United States Patent Application Publication US 2007/0048301 A1 - sequence listing, part 4

SEQ ID NO: 5991 - DNA, 3522 bp, Homo sapien
ccagggtttccagctaggacacagcaggtcgtgatccgggtcgggacactgcctggcagaggctgcgagcatggggccctggggctggaaattgcgctggaccgtcgccttgctcctcgccgcggcggggactgcagtgggcgacagatgtgaaagaaacgagttccagtgccaagacgggaaatgcatctcctacaagtgggtctgcgatggcagcgctgagtgccaggatggctctgatgagtcccaggagacgtgcttgtctgtcacctgcaaatccggggacttcagctgtgggggccgtgtcaaccgctgcattcctcagttctggaggtgcgatggccaagtggactgcgacaacggctcagacgagcaaggctgtccccccaagacgtgctcccaggacgagtttcgctgccacgatgggaagtgcatctctcggcagttcgtctgtgactcagaccgggactgcttggacggctcagacgaggcctcctgcccggtgctcacctgtggtcccgccagcttccagtgcaacagctccacctgcatcccccagctgtgggcctgcgacaacgaccccgactgcgaagatggctcggatgagtggccgcagcgctgtaggggtctttacgtgttccaaggggacagtagcccctgctcggccttcgagttccactgcctaagtggcgagtgcatccactccagctggcgctgtgatggtggccccgactgcaaggacaaatctgacgaggaaaactgcgctgtggccacctgtcgccctgacgaattccagtgctctgatggaaactgcatccatggcagccggcagtgtgaccgggaatatgactgcaaggacatgagcgatgaagttggctgcgttaatgtgacactctgcgagggacccaacaagttcaagtgtcacagcggcgaatgcatcaccctggacaaagtctgcaacatggctagagactgccgggactggtcagatgaacccatcaaagagtgcgggaccaacgaatgcttggacaacaacggcggctgttcccacgtctgcaatgaccttaagatcggctacgagtgcctgtgccccgacggcttccagctggtggcccagcgaagatgcgaagatatcgatgagtgtcaggatcccgacacctgcagccagctctgcgtgaacctggagggtggctacaagtgccagtgtgaggaaggcttccagctggacccccacacgaaggcctgcaaggctgtgggctccatcgcctacctcttcttcaccaaccggcacgaggtcaggaagatgacgctggaccggagcgagtacaccagcctcatccccaacctgaggaacgtggtcgctctggacacggaggtggccagcaatagaatctactggtctgacctgtcccagagaatgatctgcagcacccagcttgacagagcccacggcgtctcttcctatgacaccgtcatcagcagggacatccaggcccccgacgggctggctgtggactggatccacagcaacatctactggaccgactctgtcctgggcactgtctctgttgcggataccaagggcgtgaagaggaaaacgttattcagggagaacggctccaagccaagggccatcgtggtggatcctgttcatggcttcatgtactggactgactggggaactcccgccaagatcaagaaagggggcctgaatggtgtggacatctactcgctggtgactgaaaacattcagtggcccaatggcatcaccctagatctcctcagtggccgcctctactgggttgactccaaacttcactccatctcaagcatcgatgtcaatgggggcaaccggaagaccatcttggaggatgaaaagaggctggcccaccccttctccttggccgtctttgaggacaaagtattttggacagatatcatcaacgaagccattttcagtgccaaccgcctcacaggttccgatgtcaacttgttggctgaaaacctactgtccccagaggatatggtcctcttccacaacctcacccagccaagaggagtgaactggtgtgagaggaccaccctgagcaatggcggctgccagtatctgtgcctccctgccccgcagatcaacccccactcgcccaagtttacctgcgcctgcccggacggcatgctgctggccagggacatgaggagctgcctcacagaggctgaggctgcagtggccacccaggagacatccaccgtcaggctaaaggtcagctccacagccgtaaggacacagcacacaaccacccggcctgttcccgacacctcccggctgcctggggccacccctgggctcaccacggtggagatagtgacaatgtctcaccaagctctgggcgacgttgctggcagaggaaatgagaagaagcccagtagcgtgagggctctgtccattgtcctccccatcgtgctcctcgtcttcctttgcctgggggtcttccttctatggaagaactggcggcttaagaacatcaacagcatcaactttgacaaccccgtctatcagaagaccacagaggatgaggtccacatttgccacaaccaggacggctacagctacccctcgagacagatggtcagtctggaggatgacgtggcgtgaacatctgcctggagtcccgtccctgcccagaacccttcctgagacctcgccggccttgttttattcaaagacagagaagaccaaagcattgcctgccagagctttgttttatatatttattcatctgggaggcagaacaggcttcggacagtgcccatgcaatggcttgggttgggattttggtttcttcctttcctcgtgaaggataagagaaacaggcccggggggaccaggatgacacctccatttctctccaggaagttttgagtttctctccaccgtgacacaatcctcaaacatggaagatgaaagggcaggggatgtcaggcccagagaagcaagtggctttcaacacacaacagcagatggcaccaacgggaccccctggccctgcctcatccaccaatctctaagccaaacccctaaactcaggagtcaacgtgtttacctcttctatgcaagccttgctagacagccaggttagcctttgccctgtcacccccgaatcatgacccacccagtgtctttcgaggtgggtttgtaccttccttaagccaggaaagggattcatggcgtcggaaatgatctggctgaatccgtggtggcaccgagaccaaactcattcaccaaatgatgccacttcccagaggcagagcctgagtcaccggtcacccttaatatttattaagtgcctgagacacccggttaccttggccgtgaggacacgtggcctgcacccaggtgtggctgtcaggacaccagcctggtgcccatcctcccgacccctacccacttccattcccgtggtctccttgcactttctcagttcagagttgtacactgtgtaaaaaaaaaaaaaaaaaaaaaaa

SEQ ID NO: 5992 - protein, 860 aa, Homo sapien [sequence omitted]

SEQ ID NO: 5993 - DNA, 1361 bp, Homo sapien
cttttgatatggtgtactggacaggagacatccccgcacatgatgtctggcaccagactcgtcaggaccaactgcgggccctgaccaccgtcacagcacttgtgaggaagttcctggggccagtgccagtgtaccctgctgtgggtaaccatgaaagcatacctgtcaatagcttccctccccccttcattgagggcaaccactcctcccgctggctctatgaagcgatggccaaggcttgggagccctggctgcctgccgaagccctgcgcaccctcaggtacttatcgtccgtggaaacccaggaagggaaaagaaaggtgcatataattggccacattcccccagggcactgtctgaagagctggagctggaattattaccgaattgtagccaggtatgagaacaccctggctgctcagttctttggccacactcatgtggatgaatttgaggtcttctatgatgaagagactctgagccggccgctggctgtagccttcctggcacccagtgcaactacctacatcggccttaatcctggttaccgtgtgtaccaaatagatggaaactactccaggagctctcacgtggtcctggaccatgagacctacatcctgaatctgacccaggcaaacataccgggagccataccgcactggcagcttctctacagggctcgagaaacctatgggctgcccaacacactgcctaccgcctggcacaacctggtatatcgcatgcggggcgacatgcaacttttccagaccttctggtttctctaccataagggccacccaccctcggagccctgtggcacgccctgccgtctggctactctttgtgcccagctctctgcccgtgctgacagccctgctctgtgccgccacctgatgccagatgggagcctcccagaggcccagagcctgtggccaaggccactgttttgctagggccccagggcccacatttgggaaagttcttgatgtaggaaagggtgaaaaagcccaaatgctgctgtggttcaaccaggcaagatcatccggtgaaagaaccagtccctgggccccaaggatgccggggaaacaggaccttctcctttcctggagctggtttagctggatatgggagggggtttggctgcctgtgcccaggagctagactgccttgaggctgctgtcctttcacagccatggagtagaggcctaagttgacactgccctgggcagacaagacaggagctgtcgccccaggcctgtgctgcccagccaggaaccctgtactgctgctgcgacctgatgctgccagtctgttaaaataaagataagagacttggactccaaaaaaacaaaaaaaaaaaa

SEQ ID NO: 5994 - DNA, 3319 bp, Homo sapien; identical to SEQ ID NO: 1710

SEQ ID NO: 5995 - protein, 468 aa, Homo sapien; identical to SEQ ID NO: 1711

SEQ ID NO: 5996 - DNA, 1601 bp, Homo sapien; identical to SEQ ID NO: 1876

SEQ ID NO: 5997 - protein, 178 aa, Homo sapien; identical to SEQ ID NO: 1877

SEQ ID NO: 5998 - DNA, 1497 bp, Homo sapien
accaacctcttcgaggcacaaggcacaacaggctgctctgggattctcttcagccaatcttcattgctcaagtgtctgaagcagccatggcagaagtacctgagctcgccagtgaaatgatggcttattacagtggcaatgaggatgacttgttctttgaagctgatggccctaaacagatgaagtgctccttccaggacctggacctctgccctctggatggcggcatccagctacgaatctccgaccaccactacagcaagggcttcaggcaggccgcgtcagttgttgtggccatggacaagctgaggaagatgctggttccctgcccacagaccttccaggagaatgacctgagcaccttctttcccttcatctttgaagaagaacctatcttcttcgacacatgggataacgaggcttatgtgcacgatgcacctgtacgatcactgaactgcacgctccgggactcacagcaaaaaagcttggtgatgtctggtccatatgaactgaaagctctccacctccagggacaggatatggagcaacaagtggtgttctccatgtcctttgtacaaggagaagaaagtaatgacaaaatacctgtggccttgggcctcaaggaaaagaatctgtacctgtcctgcgtgttgaaagatgataagcccactctacagctggagagtgtagatcccaaaaattacccaaagaagaagatggaaaagcgatttgtcttcaacaagatagaaatcaataacaagctggaatttgagtctgcccagttccccaactggtacatcagcacctctcaagcagaaaacatgcccgtcttcctgggagggaccaaaggcggccaggatataactgacttcaccatgcaatttgtgtcttcctaaagagagctgtacccagagagtcctgtgctgaatgtggactcaatccctagggctggcagaaagggaacagaaaggtttttgagtacggctatagcctggactttcctgttgtctacaccaatgcccaactgcctgccttagggtagtgctaagaggatctcctgtccatcagccaggacagtcagctctctcctttcagggccaatccccagcccttttgttgagccaggcctctctcacctctcctactcacttaaagcccgcctgacagaaaccacggccacatttggttctaagaaaccctctgtcattcgctcccacattctgatgagcaaccgcttccctatttatttatttatttgtttgtttgttttattcattggtctaatttattcaaagggggcaagaagtagcagtgtctgtaaaagagcctagtttttaatagctatggaatcaattcaatttggactggtgtgctctctttaaatcaagtcctttaattaagactgaaaatatataagctcagattatttaaatgggaatatttataaatgagcaaatatcatactgttcaatggttctgaaataaacttctctgaag

SEQ ID NO: 5999 - protein, 269 aa, Homo sapien
MAEVPELASEMMAYYSGNEDDLFFEADGPKQMKCSFQDLDLCPLDGGIQLRISDHHYSKGFRQAASVVVAMDKLRKMLVPCPQTFQENDLSTFFPFIFEEEPIFFDTWDNEAYVHDAPVRSLNCTLRDSQQKSLVMSGPYELKALHLQGQDMEQQVVFSMSFVQGEESNDKIPVALGLKEKNLYLSCVLKDDKPTLQLESVDPKNYPKKKMEKRFVFNKIEINNKLEFESAQFPNWYISTSQAENMPVFLGGTKGGQDITDFTMQFVSS

SEQ ID NO: 6000 - DNA, 6059 bp, Homo sapien
cttcagatagattatatctggagtgaaggatcctgccacctacgtatctggcatagtgtgagtcctcataaatgcttactggtttgaagggcaacaaaatagtgaacagagtgaaaatccccactaagatcctgggtccagaaaaagatgggaaacctgtttagctcacccgtgagcccatagttaaaactctttagacaacaggttgtttccgtttacagagaacaataatattgggtggtgagcatctgtgtgggggttggggtgggataggggatacggggagagtggagaaaaaggggacacagggttaatgtgaagtccaggatccccctctacatttaaagttggtttaagttggctttaattaatagcaactcttaagataatcagaattttcttaaccttttagccttactgttgaaaagccctgtgatcttgtacaaatcatttgcttcttggatagtaatttcttttactaaaatgtgggcttttgactagatgaatgtaaatgttcttctagctctgatatcctttattctttatattttctaacagattctgtgtagtgggatgagcagagaacaaaaacaaaataatccagtgagaaaagcccgtaaataaaccttcagaccagagatctattctccagcttattttaagctcaacttaaaaagaagaactgttctctgattcttttcgccttcaatacacttaatgatttaactccaccctccttcaaaagaaacagcatttcctacttttatactgtctatatgattgatttgcacagctcatctggccagaagagctgagacatccgttcccctacaagaaactctccccggtaagtaacctctcagctgcttggcctgttagttagcttctgagatgagtaaaagactttacaggaaacccatagaagacatttggcaaacaccaagtgctcatacaattatcttaaaatataatctttaagataaggaaagggtcacagtttggaatgagtttcagacggttataacatcaaagatacaaaacatgattgtgagtgaaagactttaaagggagcaatagtattttaataactaacaatccttacctctcaaaagaaagatttgcagagagatgagtcttagctgaaatcttgaaatcttatcttctgctaaggagaactaaaccctctccagtgagatgccttctgaatatgtgcccacaagaagttgtgtctaagtctggttctcttttttctttttcctccagacaagagggaagcctaaaaatggtcaaaattaatattaaattacaaacgccaaataaaattttcctctaatatatcagtttcatggcacagttagtatataattctttatggttcaaaattaaaaatgagcttttctaggggcttctctcagctgcctagtctaaggtgcagggagtttgagactcacagggtttaataagagaaaattctcagctagagcagctgaacttaaatagactaggcaagacagctggttataagactaaactacccagaatgcatgacattcatctgtggtggcagacgaaacattttttattatattatttcttgggtatgtatgacaactcttaattgtggcaactcagaaactacaaacacaaacttcacagaaaatgtgaggattttacaattggctgttgtcatctatgaccttctctgggacttgggcacccggccatttcactctgactacatcatgtcaccaaacatctgatggtcttgccttttaattctcttttcgaggactgagagggagggtagcatggtagttaagagtgcaggcttcccgcattcaaaatcggttgcttactagctgtgtggctttgagcaagttactcaccctctctgtgcttcaaggtccttgtctgcaaaatgtgaaaaatatttcctgcctcataaggttgccctaaggattaaatgaatgaatgggtatgatgcttagaacagtgattggcatccagtatgtgccctcgaggcctcttaattattactggcttgctcatagtgcatgttctttgtgggctaactctagcgtcaataaaaatgttaagactgagttgcagccgggcatggtggctcatgcctgtaatcccagcattctaggaggctgaggcaggaggatcgcttgagcccaggagttcgagaccagcctgggcaacatagtgtgatcttgtatctataaaaataaacaaaattagcttggtgtggtggcgcctgtagtccccagccacttggaggggtgaggtgagaggattgcttgagcccgggatggtccaggctgcagtgagccatgatcgtgccactgcactccagcctgggcgacagagtgagaccctgtctcacaacaacaacaacaacaacaaaaaggctgagctgcaccatgcttgacccagtttcttaaaattgttgtcaaagcttcattcactccatggtgctatagagcacaagattttatttggtgagatggtgctttcatgaattcccccaacagagccaagctctccatctagtggacagggaagctagcagcaaaccttcccttcactacaaaacttcattgcttggccaaaaagagagttaattcaatgtagacatctatgtaggcaattaaaaacctattgatgtataaaacagtttgcattcatggagggcaactaaatacattctaggactttataaaagatcactttttatttatgcacagggtggaacaagatggattatcaagtgtcaagtccaatctatgacatcaattattatacatcggagccctgccaaaaaatcaatgtgaagcaaatcgcagcccgcctcctgcctccgctctactcactggtgttcatctttggttttgtgggcaacatgctggtcatcctcatcctgataaactgcaaaaggctgaagagcatgactgacatctacctgctcaacctggccatctctgacctgtttttccttcttactgtccccttctgggctcactatgctgccgcccagtgggactttggaaatacaatgtgtcaactcttgacagggctctattttataggcttcttctctggaatcttcttcatcatcctcctgacaatcgataggtacctggctgtcgtccatgctgtgtttgctttaaaagccaggacggtcacctttggggtggtgacaagtgtgatcacttgggtggtggctgtgtttgcgtctctcccaggaatcatctttaccagatctcaaaaagaaggtcttcattacacctgcagctctcattttccatacagtcagtatcaattctggaagaatttccagacattaaagatagtcatcttggggctggtcctgccgctgcttgtcatggtcatctgctactcgggaatcctaaaaactctgcttcggtgtcgaaatgagaagaagaggcacagggctgtgaggcttatcttcaccatcatgattgtttattttctcttctgggctccctacaacattgtccttctcctgaacaccttccaggaattctttggcctgaataattgcagtagctctaacaggttggaccaagctatgcaggtgacagagactcttgggatgacgcactgctgcatcaaccccatcatctatgcctttgtcggggagaagttcagaaactacctcttagtcttcttccaaaagcacattgccaaacgcttctgcaaatgctgttctattttccagcaagaggctcccgagcgagcaagctcagtttacacccgatccactggggagcaggaaatatctgtgggcttgtgacacggactcaagtgggctggtgacccagtcagagttgtgcacatggcttagttttcatacacagcctgggctgggggtggggtgggagaggtcttttttaaaaggaagttactgttatagagggtctaagattcatccatttatttggcatctgtttaaagtagattagatcttttaagcccatcaattatagaaagccaaatcaaaatatgttgatgaaaaatagcaacctttttatctccccttcacatgcatcaagttattgacaaactctcccttcactccgaaagttccttatgtatatttaaaagaaagcctcagagaattgctgattcttgagtttagtgatctgaacagaaataccaaaattatttcagaaatgtacaactttttacctagtacaaggcaacatataggttgtaaatgtgtttaaaacaggtctttgtcttgctatggggagaaaagacatgaatatgattagtaaagaaatgacacttttcatgtgtgatttcccctccaaggtatggttaataagtttcactgacttagaaccaggcgagagacttgtggcctgggagagctggggaagcttcttaaatgagaaggaatttgagttggatcatctattgctggcaaagacagaagcctcactgcaagcactgcatgggcaagcttggctgtagaaggagacagagctggttgggaagacatggggaggaaggacaaggctagatcatgaagaaccttgacggcattgctccgtctaagtcatgagctgagcagggagatcctggttggtgttgcagaaggtttactctgtggccaaaggagggtcaggaaggatgagcatttagggcaaggagaccaccaacagccctcaggtcagggtgaggatggcctctgctaagctcaaggcgtgaggatgggaaggagggaggtattcgtaaggatgggaaggagggaggtattcgtgcagcatatgaggatgcagagtcagcagaactggggtggatttggtttggaagtgagggtcagagaggagtcagagagaatccctagtcttcaagcagattggagaaacccttgaaaagacatcaagcacagaaggaggaggaggaggtttaggtcaagaagaagatggattggtgtaaaaggatgggtctggtttgcagagcttgaacacagtctcacccagactccaggctgtctttcactgaatgcttctgacttcatagatttccttcccatcccagctgaaatactgaggggtctccaggaggagactagatttatgaatacacgaggtatgaggtctaggaacatacttcagctcacacatgagatctaggtgaggattgattacctagtagtcatttcatgggttgttgggaggattctatgaggcaaccacaggcagcatttagcacatactacacattcaataagcatcaaactcttagttactcattcagggatagcactgagcaaagcattgagcaaaggggtcccatataggtgagggaagcctgaaaaactaagatgctgcctgcccagtgcacacaagtgtaggtatcattttctgcatttaaccgtcaataggcaaaggggggaagggacatattcatttggaaataagctgccttgagccttaaaacccacaaaagtacaatttaccagcctccgtatttcagactgaatgggggtggggggggcgccttaggtacttattccagatgccttctccagacaaaccagaagcaacagaaaaaatcgtctctccctccctttgaaatgaatataccccttagtgtttgggtatattcatttcaaagggagagagagaggtttttttctgttctttctcatatgattgtgcacatacttgagactgttttgaatttgggggatggctaaaaccatcatagtacaggtaaggtgagggaatagtaagtggtgagaactactcagggaatgaaggtgtcagaataataagaggtgctactgactttctcagcctctgaatatgaacggtgagcattgtggctgtcagcaggaagcaacgaagggaaatgtctttccttttgctcttaagttgtggagagtgcaacagtagcataggaccctaccctctgggccaagtcaaagacattctgacatcttagtatttgcatattcttatgtatgtgaaagttacaaattgcttgaaagaaaatatgcatctaataaaaaacaccttcta

SEQ ID NO: 6001 - protein, 352 aa, Homo sapien [sequence omitted]

SEQ ID NO: 6002 - DNA, 1524 bp, Homo sapien
gcagagcacagcatcgtcgggaccagactcgtctcaggccagttgcagccttctcagccaaacgccgaccaaggaaaactcactaccatgagaattgcagtgatttgcttttgcctcctaggcatcacctgtgccataccagttaaacaggctgattctggaagttctgaggaaaagcagctttacaacaaatacccagatgctgtggccacatggctaaaccctgacccatctcagaagcagaatctcctagccccacagacccttccaagtaagtccaacgaaagccatgaccacatggatgatatggatgatgaagatgatgatgaccatgtggacagccaggactccattgactcgaacgactctgatgatgtagatgacactgatgattctcaccagtctgatgagtctcaccattctgatgaatctgatgaactggtcactgattttcccacggacctgccagcaaccgaagttttcactccagttgtccccacagtagacacatatgatggccgaggtgatagtgtggtttatggactgaggtcaaaatctaagaagtttcgcagacctgacatccagtaccctgatgctacagacgaggacatcacctcacacatggaaagcgaggagttgaatggtgcatacaaggccatccccgttgcccaggacctgaacgcgccttctgattgggacagccgtgggaaggacagttatgaaacgagtcagctggatgaccagagtgctgaaacccacagccacaagcagtccagattatataagcggaaagccaatgatgagagcaatgagcattccgatgtgattgatagtcaggaactttccaaagtcagccgtgaattccacagccatgaatttcacagccatgaagatatgctggttgtagaccccaaaagtaaggaagaagataaacacctgaaatttcgtatttctcatgaattagatagtgcatcttctgaggtcaattaaaaggagaaaaaatacaatttctcactttgcatttagtcaaaagaaaaaatgctttatagcaaaatgaaagagaacatgaaatgcttctttctcagtttattggttgaatgtgtatctatttgagtctggaaataactaatgtgtttgataattagtttagtttgtggcttcatggaaactccctgtaaactaaaagcttcagggttatgtctatgttcattctatagaagaaatgcaaactatcactgtattttaatatttgttattctctcatgaatagaaatttatgtagaagcaaacaaaatacttttacccacttaaaaagagaatataacattttatgtcactataatcttttgttttttaagttagtgtatattttgttgtgattatctttttgtggtgtgaataaatcttttatcttgaatgtaataagaatttggtggtgtcaattgcttatttgttttcccacggttgtccagcaattaataaaacataaccttttttactgcctaaaaaaaaaaaaaaaaaaaa

SEQ ID NO: 6003 - protein, 300 aa, Homo sapien
MRIAVICFCLLGITCAIPVKQADSGSSEEKQLYNKYPDAVATWLNPDPSQKQNLLAPQTLPSKSNESHDHMDDMDDEDDDDHVDSQDSIDSNDSDDVDDTDDSHQSDESHHSDESDELVTDFPTDLPATEVFTPVVPTVDTYDGRGDSVVYGLRSKSKKFRRPDIQYPDATDEDITSHMESEELNGAYKAIPVAQDLNAPSDWDSRGKDSYETSQLDDQSAETHSHKQSRLYKRKANDESNEHSDVIDSQELSKVSREFHSHEFHSHEDMLVVDPKSKEEDKHLKFRISHELDSASSEVN

SEQ ID NO: 6004 - DNA, 1639 bp, Homo sapien
agcagagcacacaagcttctaggacaagagccaggaagaaaccaccggaaggaaccatctcactgtgtgtaaacatgacttccaagctggccgtggctctcttggcagccttcctgatttctgcagctctgtgtgaaggtgcagttttgccaaggagtgctaaagaacttagatgtcagtgcataaagacatactccaaacctttccaccccaaatttatcaaagaactgagagtgattgagagtggaccacactgcgccaacacagaaattattgtaaagctttctgatggaagagagctctgtctggaccccaaggaaaactgggtgcagagggttgtggagaagtttttgaagagggctgagaattcataaaaaaattcattctctgtggtatccaagaatcagtgaagatgccagtgaaacttcaagcaaatctacttcaacacttcatgtattgtgtgggtctgttgtagggttgccagatgcaatacaagattcctggttaaatttgaatttcagtaaacaatgaatagtttttcattgtaccatgaaatatccagaacatacttatatgtaaagtattatttatttgaatctacaaaaaacaacaaataatttttaaatataaggattttcctagatattgcacgggagaatatacaaatagcaaaattgagccaagggccaagagaatatccgaactttaatttcaggaattgaatgggtttgctagaatgtgatatttgaagcatcacataaaaatgatgggacaataaattttgccataaagtcaaatttagctggaaatcctggatttttttctgttaaatctggcaaccctagtctgctagccaggatccacaagtccttgttccactgtgccttggtttctcctttatttctaagtggaaaaagtattagccaccatcttacctcacagtgatgttgtgaggacatgtggaagcactttaagttttttcatcataacataaattattttcaagtgtaacttattaacctatttattatttatgtatttatttaagcatcaaatatttgtgcaagaatttggaaaaatagaagatgaatcattgattgaatagttataaagatgttatagtaaatttattttattttagatattaaatgatgttttattagataaatttcaatcagggtttttagattaaacaaagaaacaattgggtacccagttaaattttcatttcagataaacaacaaataattttttagtataagtacattattgtttatctgaaagttttaattgaactaacaatcctagtttgatactcccagtcttgtcattgccagctgtgttggtagtgctgtgttgaattacggaataatgagttagaactattaaaacagccaaaactccacagtcaatattagtaatttcttgctggttgaaacttgtttattatgtacaaatagattcttataatattatttaaatgactgcatttttaaatacaaggctttatatttttaactttaagatgtttttatgtgctctccaaattttttttactgtttctgattgtatggaaatataaaagtaaatatgaaacatttaaaatataatttgttgtcaaagtaaaaaaaaaaaaaaa

SEQ ID NO: 6005 - protein, 99 aa, Homo sapien
MTSKLAVALLAAFLISAALCEGAVLPRSAKELRCQCIKTYSKPFHPKFIKELRVIESGPHCANTEIIVKLSDGRELCLDPKENWVQRVVEKFLKRAENS

SEQ ID NO: 6006 - DNA, 674 bp, Homo sapien
gatccaaacatgagccgcctgcccgtcctgctcctgctccaactcctggtccgccccggactccaagctcccatgacccagacaacgtccttgaagacaagctgggttaactgctctaacatgatcgatgaaattataacacacttaaagcagccacctttgcctttgctggacttcaacaacctcaatggggaagaccaagacattctgatggaaaataaccttcgaaggccaaacctggaggcattcaacagggctgtcaagagtttacagaacgcatcagcaattgagagcattcttaaaaatctcctgccatgtctgcccctggccacggccgcacccacgcgacatccaatccatatcaaggacggtgactggaatgaattccggaggaaactgacgttctatctgaaaacccttgagaatgcgcaggctcaacagacgactttgagcctcgcgatcttttagtccaacgtccagctcgttctctgggccttctcaccacagcgcctcgggacatcaaaaacagcagaacttctgaaacctctgggtcatctctcacacattccaggaccagaagcatttcaccttttcctgcggcatcagatgaattgttaattatctaatttctgaaatgtgcagctcccatttggccttgtgcggttgtgttctca

SEQ ID NO: 6007 - protein, 152 aa, Homo sapien; identical to SEQ ID NO: 1931

SEQ ID NO: 6008 - DNA, 6676 bp, Homo sapien
  Unsure 10-11: Unknown base
aagaaaaatnntctttgtaatataaaaccgccagtgttagtgttgccattgctgtaattctcttgtccatttcttcatagttataatattgctgctgaagctcctgccatcacacccaaattggaattaaggggaaagacagggttcagccacttttgtctcctattaccaggaaagcaaaataattttacatactttgcattgatcgaaacatgctgcatggctacatgtagcagcaaaagaggctgaaaatgtgggtgtttggctggatacattggtaccccaaactaatcagaattctaccatcaagaaaaaggcatacatccagtgctttgtaacaaaagtgtttgccacaggctgggaatcctttgagttttctcttcagtgtctgcaaagagcagggatggaagtcagagatgtgggatggcttaagggaatttagcaaaacacctgtttctctttaccttgtttaccaccaagacactcccttccccatagtgcagtggaacactgacgagccatcatcactcctaagaaacaatacaaaatgaaaaaaaaacagtattgccatactcttacagtggaggcgaggaaatcttatgagtttgtccccactggctattatagttcagagtgctaagctaaagaacccctcaccttttcaatctactgtgtagaagctatatttacttacctgcacatacctccaaatatgtatcctagaaatcagatttgaaatcttataaatcccagaagtaggaagttcgtatttcaagaactacttttcaaattagtgttttaattcaacaagcatttagtgagtgcccacagttccccaggcacctccttaagtgctgagaatataggggtgaactggacccataaagccctggagtatatatcctggtgggagaggcagataaaagatctgcagaaaaacaggagttcaggaggattaagagctgaaatcaggaggcagacttctgggcttgaatacaaattctgcggcttcctggctttgtggttttgggcaaattacctgcctctctatgcctcagtttctccatctgtaagataataagaataattatagtacttcatagagttacactgagattgcttttttgactcatagtgattaaacacagccatactgaagggccaggaagctaagatgtagacagtgttttaaagggtaaaaaatggtgatgacaaattactccccacctcatttggcagccgagtgtattacatggcttaatgcatgtaaagtacttagaaatgttgctagtatggtcaggcccagtggctcatgcctgtaatcccagaactttgggaggccaaggcgggcggatcacgaggtcaggagttcaagaccagcctggccaacatagtgaaacctcgtctctactaaaaatacaaaaaattagccgggcgtggtggagggtgcctgtaattctagctactcgggaggctgaggcaggagaatcgcttgaacccgggaggcagaggttgcagcgaacctggattgtgccaccgcactccagcctggtgacagagggagactctgtctcaaaaaaaaaaaaaaaaaaaaagaaatgttactagtatgtagtaagttctcagtaaatgttagctactatactctttcaagtgctgggtttttacttgatgtcatacagtgttatataagatctccaaagatactgaggagtcctcaaggccaattttaacaagcatggttgccgcattcttgtgcttatagttgaacatttcttctttcagacacttgcacaaagggatacttctaagatgcatttgcattaggtggcaaacttcatcctgggtatgaaaaacattgagatttgggaataaagcatagtaagactgaggttgcaattactaaaggaaaaccccaacagagataagtgaagttctgcaatatcatgcaccctcccccaacccgctctgtctccccaggccccccttcgttagaacacccatgactggctatattatatcagcatttcccataatgtaaaaagggaaaatacagacctgggcgttcatggaaagtattctaactctcacaaccagaatccctgtctttgaattttttttcttggtttttagatctttaacttttccttcagcatttcagtactcaactttttgaaaatcatcttttctgaggaatgatatttcctggcacagcatcatctctgtcaagtgactcagtttgatttttttgtttgttagtataaagtggccccaacttacagagaaaaagtgggctcttggtatcagtttgatgtcagggtttttccgtgtttgagagggagctttaaataccactcgatttgaaggtgtctgcaagcgagctccagtccgctgtcaagatgcttctggccatggtccttacctctgccctgctcctgtgctccgtggcaggccaggggtgtccaaccttggcggggatcctggacatcaacttcctcatcaacaagatgcaggtaggctgcagggggagcccatgggaaagacagctactgacaaagtgaaatatgtatgaggatgaaaaaactcggggctgactaaaggttcttatctctctatctactttaggaagatccagcttccaagtgccactgcagtgctaatgtgagtgaatgctctttaagaactttccaaattaattttaattttcacatctggaatcttcactctgaaatttcccttgcaggtgaccagttgtctctgtttgggcattccctctgtaagtatagtgaaataacataatgttgaccttggatttttttggtttgtttttaagtaaaaataagttgctttatttaatatttaatgttatacattgttgcttaatttaattgttacagattagtattccctgttaaaaccacattgttacaaattattcccttttaaaactacgatcttgaaatcctatattatgaacatttctttgtatttaattaactttatgcctcttgagaagtttgaacacttttcaacattaaaaaaagaatcctgaatatctttttagataggtggccatgtgcacaattaaataaaactggaactaaggatataataattgctgtagctcatatcatattgctttctaactcatttactgataactctagagttgtgaaacaatgtaaataaaatgacaactccttatctttcatctgtcatgaatgatctatgcgctatacctccccctccctgcctcctcccttcctccccaccaccctgttgtctgtctagctgattagagtgactgttggtttgaatgctgccctctgggcaggtagaggatctgaggttgtgagtggaaggagggcttccagagggccactgcccactacggcaggaaggatgggtggcaggaaagttctgattcctaattcaaactcctggttagggtgaggaggaggcacttctccaaggtgcagtgctttattctttctcatgcaaggcctgggagaatctgaagaatctgagcttcttgccctggctagggtaagacatcgcacccatcgcggtccatccattagatgagaagaggatagagtgccttctgggcaggaaccaggcagacagcacagcccctgtcccttggagtacagtccatgtttttagctgctgctgaaataccagctgcattcaattgtcacatcccattagctggtgtgaaaaggcttttcctcactctgcactttcagacttacaagccttgaagccgggaagcacccgttgaaaagaacattcagagccgactatttcagggcccagagccctcatgtttcctggatgtaacatacaggaagtctcctccaggggatgtcactgtggaaaaatggcatcccctttaaatacgggagatcacttcctacattggcaagggacctgtctaaaaataatgcaagtttgagtaatggtgattaaataaaaatcatctctattatattgctctttgtgatatatttccaaagctgtcctcagaatatttctttgaataaatccttactatttaccaggacaactgcaccagaccatgcttcagtgagagactgtctcagatgaccaataccaccatgcaaacaagatacccactgattttcagtcgggtgaaaaaatcagttgaagtactaaagaacaacaagtgtccagtaagtttgttttcatatgtgatatgttcctgttggtgatttctatgtgaatggtgatgccaaccctgtttgaacacaaaaggatgataaagttggaattggtagttcaaggttgataaaagacatctaagaattttaatcagaagtaatataattaaagtgagatccactgaaacaatagaattaaagtgagatagatcattgttcctgacgaggccatttacttctctctactatggaataatgaaagaatcctttctgagtgtaattagaagctacaatctagagaatcagggatgtagctcacataatactaaattatcctagagattcaatgtactaactgaatggatgttgttaacagggatttttttttcctgttggttaaggaggttttgttttgttttggagacagagtcttgctctgttgcccaggctggagtgcagtggtgccatctgagctcactgcagcctctgcctcccgggttcaagtgattatcctgcctcagcctcccgagtagctggcattacaggtgcgtgccaccatgcctggctaatttttgtatttttaatagagatggggtttcaccatgttggccaggttgctctccaactcctgaactcaagtgatttgcccgccttgacctcccaaagtgctgggatgacaggtgtgagccaccatgcctggcctgcattaaggaggtatttaaagggcaatgcacccaggtcaaggtggaagcttgctactcatcctgaatgcccatccacacattcttttcttcagcatataccctagtccctgacagcagactgggatggcaagttgggtagaggtgacctccctctgttttttgggtattagcatctccacacaagatcctagaaggctgaaagccctgagctcagctgtttagctgcatgcgtttctaccatcaatggcatctagttctaagtgcttaatatatgctgtctcactgaataaatacataccttagggacaattattcaatttattactctcagtgaggttaactaatttgcctaaggctgcatatttgataagtggcagagctgagatttgaactcaggcctatatgacctcagagccccactcttagccattgtactgtcaaatgaccttggaaagacaacctaaaaggataatgatacaattttaggcctcaaagagtccccagaaaaggctttctctaatgcagagatttagggccacttaataggggtgtgtgtgtgtgtgtgtgtgtgtgtgtgtgtgtgtgtgtgtgtaaagacccctgaaatccaatttgaggtcaaccacctatgctgtctttacaccacatgagctagcctggacctgcccacctatttgctctgtgtctcaagccacttcccttcccatccccacaatcctcaccaccgactctggctcttggcaggtaggcttctggggctgcttggctctacatcatttgagtcactctgtccttatcaactttcatccccacagtatttttcctgtgaacagccatgcaaccaaaccacggcaggcaacgcgctgacatttctgaagagtcttctggaaattttccagaaagaaaagatgagagggatgagaggcaagatatgaagatgaaatattatttatcctatttattaaatttaaaaagctttctctttaagttgctacaatttaaaaatcaagtaagctactctaaatcagtatcagttgtgattatttgtttaacattgtatgtctttattttgaaataaatacatatgtggaaaaaacaacatgagctggtctcttggcaattattcatttcttgctgctcagaacaaagaaagctacaagtgttgttaaggggaagaatagatcagagactcctgtaggagtctctgtgataagactcctgatgctgaatacagaccctcaggctcataggctgtggctggagctgcaggagggctgcagggagcagttacaaagaatgtctatgaggaccatctgagggttgccactaggggaggctgaaggcatgtctgacactgctaagagggctagggtcctgagaaactggccttgtgcctgaaagaggagaaggcagcagcttggaagtgggagactgctcaagaatgtgggcatgcagaataaatgcttaataattaagtgcttaacccactagttatggtaggaagtagatattattattatgcatttctgttttatatatactgaaaccaaagcttagaaagtctgcatggcattcccaagatcccacaggtggtgagatttagaagaaggattcacccctcgtgctctctgcttccaaaccctttgctgtttgcattctgcccctttcttattctctttataccaagggtgtgcattgtgcttcttccaaccacagcctgagggtaaaatagacccatcataattccagtccacactctcatatccagaaacctagggagtcaggttt

SEQ ID NO: 6009 - DNA, 2983 bp, Homo sapien
ggcacgagggtgtgcgtgatggagaaaattgggcaccagggctgctcccgagattctcagatctgatttccacgcttgctaccaaaatagtctgggcaggccacttttggaagtaggcgttatctagtgagcaggcggccgctttcgatttcgctttcccctaaatggctgagcttctcgccagcgcaggatcagcctgttcctgggactttccgagagccccgccctcgttccctcccccagccgccagtaggggaggactcggcggtacccggagcttcaggccccaccggggcgcggagagtcccaggcccggccgggaccgggacggcgtccgagtgccaatggctagctctaggtgtcccgctccccgcgggtgccgctgcctccccggagcttctctcgcatggctggggacagtactgctacttctcgccgactgggtgctgctccggaccgcgctgccccgcatattctccctgctggtgcccaccgcgctgccactgctccgggtctgggcggtgggcctgagccgctgggccgtgctctggctgggggcctgcggggtcctcagggcaacggttggctccaagagcgaaaacgcaggtgcccagggctggctggctgctttgaagccattagctgcggcactgggcttggccctgccgggacttgccttgttccgagagctgatctcatggggagcccccgggtccgcggatagcaccaggctactgcactggggaagtcaccctaccgccttcgttgtcagttatgcagcggcactgcccgcagcagccctgtggcacaaactcgggagcctctgggtgcccggcggtcagggcggctctggaaaccctgtgcgtcggcttctaggctgcctgggctcggagacgcgccgcctctcgctgttcctggtcctggtggtcctctcctctcttggggagatggccattccattctttacgggccgcctcactgactggattctacaagatggctcagccgataccttcactcgaaacttaactctcatgtccattctcaccatagccagtgcagtgctggagttcgtgggtgacgggatctataacaacaccatgggccacgtgcacagccacttgcagggagaggtgtttggggctgtcctgcgccaggagacggagtttttccaacagaaccagacaggtaacatcatgtctcgggtaacagaggacacgtccaccctgagtgattctctgagtgagaatctgagcttatttctgtggtacctggtgcgaggcctatgtctcttggggatcatgctctggggatcagtgtccctcaccatggtcaccctgatcaccctgcctctgcttttccttctgcccaagaaggtgggaaaatggtaccagttgctggaagtgcaggtgcgggaatctctggcaaagtccagccaggtggccattgaggctctgtcggccatgcctacagttcgaagctttgccaacgaggagggcgaagcccagaagtttagggaaaagctgcaagaaataaagacactcaaccagaaggaggctgtggcctatgcagtcaactcctggaccactagtatttcaggtatgctgctgaaagtgggaatcctctacattggtgggcagctggtgaccagtggggctgtaagcagtgggaaccttgtcacatttgttctctaccagatgcagttcacccaggctgtggaggtactgctctccatctaccccagagtacagaaggctgtgggctcctcagagaaaatatttgagtacctggaccgcacccctcgctgcccacccagtggtctgttgactcccttacacttggagggccttgtccagttccaagatgtctcctttgcctacccaaaccgcccagatgtcttagtgctacaggggctgacattcaccctacgccctggcgaggtgacggcgctggtgggacccaatgggtctgggaagagcacagtggctgccctgctgcagaatctgtaccagcccaccgggggacagctgctgttggatgggaagccccttccccaatatgagcaccgctacctgcacaggcaggtggctgcagtgggacaagagccacaggtatttggaagaagtcttcaagaaaatattgcctatggcctgacccagaagccaactatggaggaaatcacagctgctgcagtaaagtctggggcccatagtttcatctctggactccctcagggctatgacacagaggtagacgaggctgggagccagctgtcagggggtcagcgacaggcagtggcgttggcccgagcattgatccggaaaccgtgtgtacttatcctggatgatgccaccagtgccctggatgcaaacagccagttacaggtggagcagctcctgtacgaaagccctgagcggtactcccgctcagtgcttctcatcacccagcacctcagcctggtggagcaggctgaccacatcctctttctggaaggaggcgctatccgggaggggggaacccaccagcagctcatggagaaaaaggggtgctactgggccatggtgcaggctcctgcagatgctccagaatgaaagccttctcagacctgcgcactccatctccctcccttttcttctctctgtggtggagaaccacagctgcagagtaggcagctgcctccaggatgagttacttgaaatttgccttgagtgtgttacctcctttccaagctcctcgtgataatgcagacttcctggagtacaaacacaggatttgtaattccttactgtaacggagtttagagccagggctgatgctttggtgtggccagcactctgaaactgagaaatgttcagaatgtacggaaagatgatcagctattttcaacataactgaaggcatatgctggcccataaacaccctgtaggttcttgatatttataataaaattggtgttttgtaaaaaaaaaaaaaaaaaaaaaaa

SEQ ID NO: 6010 - protein, 808 aa, Homo sapien; identical to SEQ ID NO: 722

SEQ ID NO: 6011 - DNA, 4830 bp, Homo sapien
ccaggcttgtccctgctacccccacccagcctttcctgaggcctcaggcctgccaccaagcccccagctccttctccccgcagggacccaaacacaggcctcaggactcaacacagcttttccctccaaccccgttttctctccctcaaggactcagctttctgaagcccctcccagttctagttctatctttttcctgcatcctgtctggaagttagaaggaaacagaccacagacctggtccccaaaagaaatggaggcaataggttttgaggggcatggggacggggttcagcctccagggtcctacacacaaatcagtcagtggcccagaagacccccctcggaatcggagcagggaggatggggagtgtgaggggtatccttgatgcttgtgtgtccccaactttccaaatccccgcccccgcgatggagaagaaaccgagacagaaggtgcagggcccactaccgcttcctccagatgagctcatgggtttctccaccaaggaagttttccgctggttgaatgattctttccccgccctcctctcgccccagggacatataaaggcagttgttggcacacccagccagcagacgctccctcagcaaggacagcagaggaccagctaagagggagagaagcaactacagaccccccctgaaaacaaccctcagacgccacatcccctgacaagctgccaggcaggttctcttcctctcacatactgacccacggctccaccctctctcccctggaaaggacaccatgagcactgaaagcatgatccgggacgtggagctggccgaggaggcgctccccaagaagacaggggggccccagggctccaggcggtgcttgttcctcagcctcttctccttcctgatcgtggcaggcgccaccacgctcttctgcctgctgcactttggagtgatcggcccccagagggaagaggtgagtgcctggccagccttcatccactctcccacccaaggggaaatggagacgcaagagagggagagagatgggatgggtgaaagatgtgcgctgatagggagggatggagagaaaaaaacgtggagaaagacggggatgcagaaagagatgtggcaagagatggggaagagagagagagaaagatggagagacaggatgtctggcacatggaaggtgctcactaagtgtgtatggagtgaatgaatgaatgaatgaatgaacaagcagatatataaataagatatggagacagatgtggggtgtgagaagagagatgggggaagaaacaagtgatatgaataaagatggtgagacagaaagagcgggaaatatgacagctaaggagagagatgggggagataaggagagaagaagatagggtgtctggcacacagaagacactcagggaaagagctgttgaatgcctggaaggtgaatacacagatgaatggagagagaaaaccagacacctcagggctaagagcgcaggccagacaggcagccagctgttcctcctttaagggtgactccctcgatgttaaccattctccttctccccaacagttccccagggacctctctctaatcagccctctggcccaggcagtcagtaagtgtctccaaacctctttcctaattctgggtttgggtttgggggtagggttagtaccggtatggaagcagtgggggaaatttaaagttttggtcttgggggaggatggatggaggtgaaagtaggggggtattttctaggaagtttaagggtctcagctttttcttttctctctcctcttcaggatcatcttctcgaaccccgagtgacaagcctgtagcccatgttgtaggtaagagctctgaggatgtgtcttggaacttggagggctaggatttggggattgaagcccggctgatggtaggcagaacttggagacaatgtgagaaggactcgctgagctcaagggaagggtggaggaacagcacaggccttagtgggatactcagaacgtcatggccaggtgggatgtgggatgacagacagagaggacaggaaccggatgtggggtgggcagagctcgagggccaggatgtggagagtgaaccgacatggccacactgactctcctctccctctctccctccctccagcaaaccctcaagctgaggggcagctccagtggctgaaccgccgggccaatgccctcctggccaatggcgtggagctgagagataaccagctggtggtgccatcagagggcctgtacctcatctactcccaggtcctcttcaagggccaaggctgcccctccacccatgtgctcctcacccacaccatcagccgcatcgccgtctcctaccagaccaaggtcaacctcctctctgccatcaagagcccctgccagagggagaccccagagggggctgaggccaagccctggtatgagcccatctatctgggaggggtcttccagctggagaagggtgaccgactcagcgctgagatcaatcggcccgactatctcgactttgccgagtctgggcaggtctactttgggatcattgccctgtgaggaggacgaacatccaaccttcccaaacgcctcccctgccccaatccctttattaccccctccttcagacaccctcaacctcttctggctcaaaaagagaattgggggcttagggtcggaacccaagcttagaactttaagcaacaagaccaccacttcgaaacctgggattcaggaatgtgtggcctgcacagtgaagtgctggcaaccactaagaattcaaactggggcctccagaactcactggggcctacagctttgatccctgacatctggaatctggagaccagggagcctttggttctggccagaatgctgcaggacttgagaagacctcacctagaaattgacacaagtggaccttaggccttcctctctccagatgtttccagacttccttgagacacggagcccagccctccccatggagccagctccctctatttatgtttgcacttgtgattatttattatttatttattatttatttatttacagatgaatgtatttatttgggagaccggggtatcctgggggacccaatgtaggagctgccttggctcagacatgttttccgtgaaaacggagctgaacaataggctgttcccatgtagccccctggcctctgtgccttcttttgattatgttttttaaaatatttatctgattaagttgtctaaacaatgctgatttggtgaccaactgtcactcattgctgagcctctgctccccaggggagttgtgtctgtaatcgccctactattcagtggcgagaaataaagtttgcttagaaaagaaacatggtctccttcttggaattaattctgcatctgcctcttcttgtgggtgggaagaagctccctaagtcctctctccacaggctttaagatccctcggacccagtcccatccttagactcctagggccctggagaccctacataaacaaagcccaacagaatattccccatcccccaggaaacaagagcctgaacctaattacctctccctcagggcatgggaatttccaactctgggaattccaatccttgctgggaaaatcctgcagctcaggtgagatttccggctgttgcagctggccagcagtccggagagagctggagaggagccgcattctcaggtacctgaatcacacagccaagggacttccagagattcgggtgtctaggcttcaaatcaccctgtcctaactctgcaacctgaaccagccacttaacctatctatccaatggggataggaatgtccaccacacatagggcatgtgagagaaggcctgacctccatcagaggacctcactcagcccttggcacagtgggcacttagtgaattctggcttccttcaaccagtttccagctgttctatccccttccattctctcagtgggtgaaatcgaagagactgaggacaataaagaacaaggaaccgaactgccggacgtggtggcatgcacctgtaatcctaccactttgcaaggccaaggtgagaggatcgcttgaacccaggagttccagagcaacctgggcaacatagtgagatcctgtctctattttttaaaaaagaatgaaacataggaataagatgtgggtgaaggactcacatgccggcttggtcccactggtctttgtggtgaaggaggggagaggtgagaggtgggtaatccggaaagagaaaagcaccccctccctggatgaaggctcttctggagagagtcaaagacaaataagggtggggcgcagtggctcatgcctgttatcccaacactttgggaggctgaggtgggaggaccacttgagcccactagttcaagaccagcctgtgcaacatagcaagaccttgtttctagaaaaaaaattaaagattagtcaggtgtagtggtgcatgcctgtaatcctagctcctcaggaggctgaggcaggaggatcactcaagcccaggagtttgaggttacagtaagctatgatcatgccactgtacccccgtctgggtgacagaacgagaccctgtctcaaaaaaataataattccaaaaacaaatatggagacggaaattgagcccccctagactgggagcccccactgagttcggaaattaggctttacctccagccctggggtgccaggcaggagaaaaccatgtggtaggctgagggggtagggtgacccattggggtgacctagatagggccttgggtcaccctctgcctcctccagcctgtggctgaaagtcagccatgaagtaatgg

SEQ ID NO: 6012 - DNA, 5033 bp, Homo sapien
tattggccataacccttatgatgggtcaggaagggatcacccctttctgcccctacagaaataatagctaagactagtaaagcataaaaggcaaaggggcaggtcctcaagtagagaagaacaggagaaatagctcatacacacccagaatgttacttacatgtccctccatgttacaccaagacccctcagggaccttgtgcctggggagagaagtggtctgccccatgcaacagtgggctttaccccgggtcaccaccagccccagctccaacccctctaacactctccaagtaaaatcacatcagtagcagtaataatatttgaggtgacaagttggtattatctcaaacttaggaaaagtgaataaagtcatctttagaaactgctttttttaaaccttgtaacttgcaagctaagtgaaaatgggctcatgtatgagaatgttcgtgttagacattttttgtgttagacaaaaactagaaacaaaccaaatccccatcaacagaatatattagaatatattgatacaatagaatattacatcataattttttttaaaaacattactgatacatacaaccacgtatatgaatctcacaaacataatgctgactgaaagaagtcaaacagaaatgagtacattctgtgtgatttcatttatatgatgccccaaaccaggaggaaataatctatggtgataaaagtgagagagtggttggttatctttggagggtatcagcagggagggggcatgagggaacctgctggggacctgaaaatacgtggagctgggtggtggctacatacagatggaaaaattcatcagctgtacacttaagaggtgtccacctcatacctaagttacatatcaataaaaaggaaaaaaattttggaaacttttttttttttttttgagacagagtcttgctctgtcccccaggctggaatacagtggtgcgatcttgactcactgcagcctccgcctcccaggttcaaataattctccagcctcagcctcccgagtagctgggactgcagatgcgcaccagcacgcctggctaatttttgtatttattatagagatggggtttcaccatgttggccagctggtctcaaactcctgacctcaagtaatccgcccacctcagactcccaaagtgccaggattacaggtgtgagccactgcaccaggcctggaacaattttaaaataatgtattggctctgcaaatgcagcttcagaacaagtcccttagctgtccccaccccaccctaagtcaccacccttaagcctcacccatgtggaattctgaaacttcctttgtagaaaactttggaaggtgtctgccacattgatcctggaatgtgtgtttatttggggttatataaatctgttctgtggaagccacctgaagtcaggaagagatggagggcatccttcaggagtgagatgagacctcatcatacttgactgtccagcatcatctctgagtaaggggaccaaaaaatttatcttccaaactaggacactttcaagagtggaagggggatccattaatattttcacctggacaagaggcaaacaccagaatgtccccgatgaaggggatatataatggaccttcttgatgtgaaacctgccagatgggctggaaagtccgtatactgggacaagtatgatttgagttgtttgggacaaggacaggggtacaagagaaggaaatgggcaaagagagaagcctgtactcagccaagggtgcagagatgttatatatgattgctcttcagggaaccgggcctccagctcacaccccagctgctcaaccgcctcctctctgaattgactgtcccttctttggaactctaggcctgaccccactccctggccctcccagcccacgattcccctgacccgactccctttcccagaactcagtcgcctgaacccccagcctgtggttctctcctaggcctcagcctttcctgcctttgactgaaacagcagtatcttctaagccctgggggcttccccgggccccagccccgacctagaacccgcccgctgcctgccacgctgccactgccgcttcctctataaagggacctgagcgtccgggcccaggggctccgcacagcaggtgaggctctcctgccccatctccttgggctgcccgtgcttcgtgctttggactaccgccccgcagtgtcctgccctctgcctgggcctcggtccctcctgcacctgctgcctggatccccggcctgcctgggcctgggccttggtgggtttggttttggtttccttctctgtctctgactctccatctgtcagtctcattgtctctgtcacacattctctgtttctgccatgattcctctctgttcccttcctgtctctctctgtctccctctgctcaccttggggtttctctgactgcatcttgtccccttctctgtcgatctctctctcgggggtcggggggtgctgtctcccagggcgggaggtctgtcttccgccgcgtgccccgccccgctcactgtctctctctctctctctctctttctctgcaggttctccccatgacaccacctgaacgtctcttcctcccaagggtgtgtggcaccaccctacacctcctccttctggggctgctgctggttctgctgcctggggcccaggtgaggcagcaggagaatgggggctgctggggtggctcagccaaaccttgagccctagagcccccctcaactctgttctcccctaggggctccctggtgttggcctcacaccttcagctgcccagactgcccgtcagcaccccaagatgcatcttgcccacagcaccctcaaacctgctgctcacctcattggtaaacatccacctgacctcccagacatgtccccaccagctctcctcctacccctgcctcaggaacccaagcatccacccctctcccccaacttcccccacgctaaaaaaaacagagggagcccactcctatgcctccccctgccatcccccaggaactcagttgttcagtgcccacttcctcagggattgagacctctgatccagacccctgatctcccacccccatcccctatggctcttcctaggagaccccagcaagcagaactcactgctctggagagcaaacacggaccgtgccttcctccaggatggtttctccttgagcaacaattctctcctggtccccaccagtggcatctacttcgtctactcccaggtggtcttctctgggaaagcctactctcccaaggccacctcctccccactctacctggcccatgaggtccagctcttctcctcccagtaccccttccatgtgcctctcctcagctcccagaagatggtgtatccagggctgcaggaaccctggctgcactcgatgtaccacggggctgcgttccagctcacccagggagaccagctatccacccacacagatggcatcccccacctagtcctcagccctagtactgtcttctttggagccttcgctctgtagaacttggaaaaatccagaaagaaaaaataattgatttcaagaccttctccccattctgcctccattctgaccatttcaggggtcgtcaccacctctcctttggccattccaacagctcaagtcttccctgatcaagtcaccggagctttcaaagaaggaattctaggcatcccaggggaccacacctccctgaaccatccctgatgtctgtctggctgaggatttcaagcctgcctaggaattcccagcccaaagctgttggtctgtcccaccagctaggtggggcctagatccacacacagaggaagagcaggcacatggaggagcttgggggatgactagaggcagggaggggactatttatgaaggcaaaaaaattaaattatttatttatggaggatggagagaggggaataatagaagaacatccaaggagaaacagagacaggcccaagagatgaagagtgagagggcatgcgcacaaggctgaccaagagagaaagaagtaggcatgagggatcacagggccccagaaggcagggaaaggctctgaaagccagctgccgaccagagccccacacggaggcatctgcaccctcgatgaagcccaataaacctcttttctctgaaatgctgtctgcttgtgtgtgtgtgtctgggagtgagaacttcccagtctatctaaggaatggagggagggacagagggctcaaagggagcaagagctgtggggagaacaaaaggataagggctcagagagcttcagggatatgtgatggactcaccaggtgaggccgccagactgctgcaggggaagcaaaggagaagctgagaagatgaaggaaaagtcagggtctggaggggcgggggtcagggagctcctgggagatatggccacatgtagcggctctgaggaatgggttacaggagacctctggggagatgtgaccacagcaatgggtaggagaatgtccagggctatggaagtcgagtatggggacccccccttaacgaagacagggccatgtagagggccccagggagtgaaagagcctccaggacctccaggtatggaatacaggggacgtttaagaagatatggccacacactggggccctgagaagtgagagcttcatgaaaaaaatcagggaccccagagttccttggaagccaagactgaaaccagcattatgagtctccgggtcagaatgaaagaagaaggcctgccccagtggggtctgtgaattcccgggggtgatttcactccccggggctgtcccaggcttgtccctgctacccccacccagcctttcctgaggcctcaagcctgccaccaagcccccagctccttctccccgcagggacccaaacacaggcctcaggactcaacacagcttttccctccaaccccgttttctctccctcaaggactcagctttctgaagcccctcccagttctagttctatctttttcctgcatcctgtctggaagttagaag

SEQ ID NO: 6013 - DNA, 1438 bp, Homo sapien
ggccacgagggcggctcccgcgctcgcagggccgtgccacctgcccgcccgcccgctcgctcgctcgcccgccgcgccgcgctgccgaccgccagcatgctgccgagagtgggctgccccgcgctgccgctgccgccgccgccgctgctgccgctgctgccgctgctgctgctgctactgggcgcgagtggcggcggcggcggggcgcgcgcggaggtgctgttccgctgcccgccctgcacacccgagcgcctggccgcctgcgggcccccgccggttgcgccgcccgccgcggtggccgcagtggccggaggcgcccgcatgccatgcgcggagctcgtccgggagccgggctgcggctgctgctcggtgtgcgcccggctggagggcgaggcgtgcggcgtctacaccccgcgctgcggccaggggctgcgctgctatccccacccgggctccgagctgcccctgcaggcgctggtcatgggcgagggcacttgtgagaagcgccgggacgccgagtatggcgccagcccggagcaggttgcagacaatggcgatgaccactcagaaggaggcctggtggagaaccacgtggacagcaccatgaacatgttgggcgggggaggcagtgctggccggaagcccctcaagtcgggtatgaaggagctggccgtgttccgggagaaggtcactgagcagcaccggcagatgggcaagggtggcaagcatcaccttggcctggaggagcccaagaagctgcgaccaccccctgccaggactccctgccaacaggaactggaccaggtcctggagcggatctccaccatgcgccttccggatgagcggggccctctggagcacctctactccctgcacatccccaactgtgacaagcatggcctgtacaacctcaaacagtgcaagatgtctctgaacgggcagcgtggggagtgctggtgtgtgaaccccaacaccgggaagctgatccagggagcccccaccatccggggggaccccgagtgtcatctcttctacaatgagcagcaggaggctcgcggggtgcacacccagcggatgcagtagaccgcagccagccggtgcctggcgcccctgccccccgcccctctccaaacaccggcagaaaacggagagtgcttgggtggtgggtgctggaggattttccagttctgacacacgtatttatatttggaaagagaccagcaccgagctcggcacctccccggcctctctcttcccagctgcagatgccacacctgctccttcttgctttccccgggggaggaagggggttgtggtcggggagctggggtacaggtttggggagggggaagagaaatttttatttttgaacccctgtgtcccttttgcataagattaaaggaaggaaaagtaaaaaaaaaaaaaaaaaaaaaaaaaa

SEQ ID NO: 6014 - protein, 328 aa, Homo sapien
MLPRVGCPALPLPPPPLLPLLPLLLLLLGASGGGGGARAEVLFRCPPCTPERLAACGPPPVAPPAAVAAVAGGARMPCAELVREPGCGCCSVCARLEGEACGVYTPRCGQGLRCYPHPGSELPLQALVMGEGTCEKRRDAEYGASPEQVADNGDDHSEGGLVENHVDSTMNMLGGGGSAGRKPLKSGMKELAVFREKVTEQHRQMGKGGKHHLGLEEPKKLRPPPARTPCQQELDQVLERISTMRLPDERGPLEHLYSLHIPNCDKHGLYNLKQCKMSLNGQRGECWCVNPNTGKLIQGAPTIRGDPECHLFYNEQQEARGVHTQRMQ

SEQ ID NO: 6015 - DNA, 1125 bp, Homo sapien
ttctgccctcgagcccaccgggaacgaaagagaagctctatctcgcctccaggagcccagctatgaactccttctccacaagcgccttcggtccagttgccttctccctggggctgctcctggtgttgcctgctgccttccctgccccagtacccccaggagaagattccaaagatgtagccgccccacacagacagccactcacctcttcagaacgaattgacaaacaaattcggtacatcctcgacggcatctcagccctgagaaaggagacatgtaacaagagtaacatgtgtgaaagcagcaaagaggcactggcagaaaacaacctgaaccttccaaagatggctgaaaaagatggatgcttccaatctggattcaatgaggagacttgcctggtgaaaatcatcactggtcttttggagtttgaggtatacctagagtacctccagaacagatttgagagtagtgaggaacaagccagagctgtgcagatgagtacaaaagtcctgatccagttcctgcagaaaaaggcaaagaatctagatgcaataaccacccctgacccaaccacaaatgccagcctgctgacgaagctgcaggcacagaaccagtggctgcaggacatgacaactcatctcattctgcgcagctttaaggagttcctgcagtccagcctgagggctcttcggcaaatgtagcatgggcacctcagattgttgttgttaatgggcattccttcttctggtcagaaacctgtccactgggcacagaacttatgttgttctctatggagaactaaaagtatgagcgttaggacactattttaattatttttaatttattaatatttaaatatgtgaagctgagttaatttatgtaagtcatatttatatttttaagaagtaccacttgaaacattttatgtattagttttgaaataataatggaaagtggctatgcagtttgaatatcctttgtttcagagccagatcatttcttggaaagtgtaggcttacctcaaataaatggctaacttatacatatttttaaagaaatatttatattgtatttatataatgtataaatggtttttataccaataaatggcattttaaaaaattc

SEQ ID NO: 6016 - protein, 212 aa, Homo sapien
MNSFSTSAFGPVAFSLGLLLVLPAAFPAPVPPGEDSKDVAAPHRQPLTSSERIDKQIRYILDGISALRKETCNKSNMCESSKEALAENNLNLPKMAEKDGCFQSGFNEETCLVKIITGLLEFEVYLEYLQNRFESSEEQARAVQMSTKVLIQFLQKKAKNLDAITTPDPTTNASLLTKLQAQNQWLQDMTTHLILRSFKEFLQSSLRALRQM

SEQ ID NO: 6017 - DNA, 3091 bp, Homo sapien
gggagacccaagcttctagagatccctcgacctcgagatccattgtgctctaaagagcggaccccagcctctgccaggttcggtccgccatcctcgtcccgtcctccgccggcccctgccccgcgcccagggatcctccagctcctttcgcccgcgccctccgttcgctccggacaccatggacaagttttggtggcacgcagcctggggactctgcctcgtgccgctgagcctggcgcagatcgatttgaatataacctgccgctttgcaggtgtattccacgtggagaaaaatggtcgctacagcatctctcggacggaggccgctgacctctgcaaggctttcaatagcaccttgcccacaatggcccagatggagaaagctctgagcatcggatttgagacctgcaggtatgggttcatagaagggcatgtggtgattccccggatccaccccaactccatctgtgcagcaaacaacacaggggtgtacatcctcacatacaacacctcccagtatgacacatattgcttcaatgcttcagctccacctgaagaagattgtacatcagtcacagacctgcccaatgcctttgatggaccaattaccataactattgttaaccgtgatggcacccgctatgtccagaaaggagaatacagaacgaatcctgaagacatctaccccagcaaccctactgatgatgacgtgagcagcggctcctccagtgaaaggagcagcacttcaggaggttacatcttttacaccttttctactgtacaccccatcccagacgaagacagtccctggatcaccgacagcacagacagaatccctgctaccactttgatgagcactagtgctacagcaactgagacagcaaccaagaggcaagaagcctgggattggttttcatggttgtttctaccatcagagtcaaagaatcatcttcacacaacaacacaaatggctggtacgtcttcaaataccatctcagcaggctgggagccaaatgaagaaaatgaagatgaaagagacagacacctcagtttttctggatcaggcattgatgatgatgaagattttatctccagcaccatttcaaccacaccacgggcctttgaccacacaaaacagaaccaggactggacccagtggaacccaagccattcaaatccggaagtgctacttcagacaaccacaaggatgactgatgtagacagaaatggcaccactgcttatgaaggaaactggaacccagaagcacaccctcccctcattcaccatgagcatcatgaggaagaagagaccccacattctacaagcacaatccaggcaactcctagtagtacaacggaagaaacagctacccagaaggaacagtggtttggcaacagatggcatgagggatatcgccaaacacccagagaagactcccattcgacaacagggacagctgcagcctcagctcataccagccatccaatgcaaggaaggacaacaccaagcccagaggacagttcctggactgatttcttcaacccaatctcacaccccatgggacgaggtcatcaagcaggaagaaggatggatatggactccagtcatagtacaacgcttcagcctactgcaaatccaaacacaggtttggtggaaaatttggacaggacaggacctctttcaatgacaacgcagcagagtaattctcagagcttctctacatcacatgaaggcttggaagaagataaagaccatccaacaacttctactctgacatcaagcaataggaatgatgtcacaggtggaagaagagacccaaatcattctgaaggctcaactactttactggaaggttatacctctcattacccacacacgaaggaaagcaggaccttcatcccagtgacctcagctaagactgggtcctttggagttactgcagttactgttggagattccaactctaatgtcaatcgttccttatcaggagaccaagacacattccaccccagtggggggtcccataccactcatggatctgaatcagatggacactcacatgggagtcaagaaggtggagcaaacacaacctctggtcctataaggacaccccaaattccagaatggctgatcatcttggcatccctcttggccttggctttgattcttgcagtttgcattgcagtcaacagtcgaagaaggtgtgggcagaagaaaaagctagtgatcaacagtggcaatggagctgtggaggacagaaagccaagtggactcaacggagaggccagcaagtctcaggaaatggtgcatttggtgaacaaggagtcgtcagaaactccagaccagtttatgacagctgatgagacaaggaacctgcagaatgtggacatgaagattggggtgtaacacctacaccattatcttggaaagaaacaaccgttggaaacataaccattacagggagctgggacacttaacagatgcaatgtgctactgattgtttcattgcgaatcttttttagcataaaattttctactctttttgttttttgtgttttgttctttaaagtcaggtccaatttgtaaaaacagcattgctttgtaaattagggcccaattaataatcagcaagaatttgatcgttcagttccacttggaggccttcatcctcgggtgtgctatggatggcttctaacaaaaactacacatatgtattcctgatcgccaacctttcccccaccagctaaggacatttcccagggttaatagggcctggtccctgggaggaaatttgaatgggtccattttgcccttccatagcctaatccctgggcattgctttccactgaggttggggtgtactagttacacatcttcaacagaccccctctagaaatttttcagatgcttctgggagacaccaaagggtgaagctatttatctgtagtaaactatttatctgtgtttttgaaatattaaaccctggatcagtcctttgatcagtataattttttaaagttactttgtcagaggcacaaaagggtttaaactgattcataataaatatctgtacttcttcgatcttcaaaa

SEQ ID NO: 6018 - protein, 742 aa, Homo sapien
MDKFWWHAAWGLCLVPLSLAQIDLNITCRFAGVFHVEKNGRYSISRTEAADLCKAFNSTLPTMAQMEKALSIGFETCRYGFIEGHVVIPRIHPNSICAANNTGVYILTYNTSQYDTYCFNASAPPEEDCTSVTDLPNAFDGPITITIVNRDGTRYVQKGEYRTNPEDIYPSNPTDDDVSSGSSSERSSTSGGYIFYTFSTVHPIPDEDSPWITDSTDRIPATTLMSTSATATETATKRQEAWDWFSWLFLPSESKNHLHTTTQMAGTSSNTISAGWEPNEENEDERDRHLSFSGSGIDDDEDFISSTISTTPRAFDHTKQNQDWTQWNPSHSNPEVLLQTTTRMTDVDRNGTTAYEGNWNPEAHPPLIHHEHHEEEETPHSTSTIQATPSSTTEETATQKEQWFGNRWHEGYRQTPREDSHSTTGTAAASAHTSHPMQGRTTPSPEDSSWTDFFNPISHPMGRGHQAGRRMDMDSSHSTTLQPTANPNTGLVENLDRTGPLSMTTQQSNSQSFSTSHEGLEEDKDHPTTSTLTSSNRNDVTGGRRDPNHSEGSTTLLEGYTSHYPHTKESRTFIPVTSAKTGSFGVTAVTVGDSNSNVNRSLSGDQDTFHPSGGSHTTHGSESDGHSHGSQEGGANTTSGPIRTPQIPEWLIILASLLALALILAVCIAVNSRRRCGQKKKLVINSGNGAVEDRKPSGLNGEASKSQEMVHLVNKESSETPDQFMTADETRNLQNVDMKIGV

SEQ ID NO: 6019 - DNA, 7665 bp, Homo sapien
acctagcattggatgaagatactattatcaagccagttttacaggtaaggagactgagtcatagaagatttaagaagttaactcacaatcatatagctagatagtagaggagtcaggaatcaagtttgccccataactgcaatactgttatgtacacagtacaggtagaaatgcaaagtgggtttgaaccaaagagtggagggctttttgtgccatcccaaagtgttgtacttcataaataaattacaaaggaggagaaagaatcctattttttttttgtatctgaaagacaaagaaataaaaagttaaaaagattctctgttagtactgattatttggaacaataaattgtttagagctatgctgttcaatatagtagcacctagcagtatgtgcccattaagcgtttgaaatacgactagaccaaattgagatgcaccgtaggcttaaaatatacactgtatttctttcctttttccttttttccttttttttttttgagacggaatcttactctgtcacctaggctggagtgtagtggcgcgatctcggctcactgcaacctccaccttctgggttcaagccattctcctgcctcagcctccctagtagctgagattacaggcatacaccaccatgcctggctaatttttttgtatttttagtagagatggggtttcaccatattggctaggctggtctcaaactcctgaccttgtgatccacccgcctcaacctcccaaagtgctgggattacaggtgtgagccactgcgtctggaactccccctgggaatattctctacactgtatttcaaggatttaatatgacaaaaagaatgtcaaataccttattaacaatgtagtatattgatgcatactgaagtactatttgggatatattggtttaaatacaatatattttaaaattatatttaccttttaaaaaaacttttattaatgaggctactagatcatttaaatttacctgtgtggcttgtattgtatttctactgggcagtgctgatctagagcaatttgaaacttgtggtagatattttactaaccaactctgatgaaggacttcctcaccaaattgttcttttaaccgcattctttccttgctttctggtcatttgcaagaaaaattttaaaaggctgcccctttgtaaaggtttgagaggccctagaatttcgtttttcacttgttcccaaccacaagcaaatgatcaatgtgctttgtgaatgaagagtcaacattttaccagggcgaagtggggaggtacaaaaaaatttccagtccttgaatggtgtgaagtaaaagtgccttcaaagaatcccaccagaatggcacaggtgggcataatgggtctgtctcatcgtcaaaggacccaaggagtctaaaggaaactctaactacaacacccaaatgccacaaaaccttagttattaatacaaactatcatccctgcctatctgtcaccatctcatcttaaaaaacttgtgaaaatacgtaatcctcaggagacttcaattaggtataaataccagcagccagaggaggtgcagcacattgttctgatcatctgaagatcagctattagaagagaaagatcagttaagtcctttggacctgatcagcttgatacaagaactactgatttcaacttctttggcttaattctctcggaaacgatgaaatatacaagttatatcttggcttttcagctctgcatcgttttgggttctcttggctgttactgccaggacccatatgtaaaagaagcagaaaaccttaagaaatattttgtaagtatgactttttaatagtacttgtttgtggttgaaaatgactgaatatcgacttgctgtagcatctctgataggctgtcatctcttgtaggcagtcattttgagatttggtgttattttgttaattattgactagatgagttccttgactaaataatctagatattgttttaaccttctgctcagtttgtatagagacttaaaagggatttatgaattttccaaaagatgggcataatatgggtatgaagcataatgatgttaataattttgtggtgggaactcattcagttgtgatagtcaaggagtatgcagattgaaaaaaatgattggttattagtttttgacttctcagactctaaggtcaagattagcattaaaaaggtaataggaaatgtttacaaattaaagtcaaaaaggtccttaaagctttggcttaaaaaaataactgataggtgattttctccaaaaagtgatttcaacattctgcttctctatctatattacttgtgaagtattccggaacttcgttgctcactgggattttggaagaattatgattctggctaaggaatgtttaaaaattttaagtgaattttttgagtttcttttaaaattttattgatggttaatgaaaagtttttacattttaaatatttcattatttgtttaaaacttagctgttataattatagctgtcataataatattcagacattcacaattgattttattcttacaacacaaaatcaaatctcacacacacacacacacacacacactcgcacatgtttggaactatcttttaaagctcgtataataataccctacaggaaggcacagtagatgtaatagaaacctgtaccattggggggcagtattttatagtggggtggctttgctgttttttgtttttgtattttttagcctagcttgaaaatactttctttagcttactatagtttttgggacctttggagtatcagctttgttgagctcatttgtgacattgcaatttaatggttatattgggaaataaaaaagctaaaagaacataatagtctttgtctatatctcacataagccttttgggaatacttattgttagaactaagcagaagagttgaaaaggaaatcagtgaatattgtcacatctgagttcaatgaaacttgaaatatatttttaaggcaatttatgggctaattgtaaaccaattttttcttttttttttttagaatgcaggtcattcagatgtagcggataatggaactcttttcttaggcattttgaagaattggaaagaggtaagctgaatattcccatttggctaattttcctgttgcttgctttctgatggataaattcacatcatcctctgtttgtgctctttccttccaaggagagtgacagaaaaataatgcagagccaaattgtctccttttacttcaaactttttaaaaactttaaagatgaccagagcatccaaaagagtgtggagaccatcaaggaagacatgaatgtcaagtttttcaatagcaacaaaaagaaacgagatgacttcgaaaagctgactaattattcggtgaggctatttaaattctttctttggtttcattgccgagggtcttgcaaagcatttattctccagaaagtagacattagctatttaacagttgctaaagctatgaactcaactcatggctgaaactctaccttactatttccattcgtgtttgggtgactttgcaaagccagtaagagaatcgctgaagtatgtaatgtagagaaatgctggcattgtaactattgcgtaaagacaggtgagttgacaaatccagtgaagaggaagtaggtgaggaagaagcagggagtactgagaagcagttctctcattgtcccttgctcatatgatggaaattctcttactttgaatgagaggctgtctgtcttaatggaaagagcagtgggaggagctgagaagatgtgtgttctcctcccaactcagccaccaaggaactgtgatgaatcacatggctggctggggctcagtttcctcatcttaaaaggaaactgttaggttcactgtataagtttgatgaccttctttgctccaaaactctacaatgcaaagaatagaaaatgagaatgagatagaagaaagctacagtctttgaataggtaccagggacaccccactgcaagtctctagccaacctatcagattgtactgcccaattagaagcaagaatggttgctgtttgtttgtttttagggaaaaatagatagaatttataccttatgaaaagattgttctatcaactctctatcaactttcagaatatctcagctggagaactccttagactcctaagtcttacctcatgaacttgtatctttaagttatggcttctataaacagaaagataacgttgaggcataaagacaaatcatgtttttcaaaatgttttctagaagacaaaggcctctagattcctttggggttgactttgatataaatgggctcaaatgagagggaccagggtcttcaagctagcatttgtgttcttaggatatgtgctcagctttcactattgctgggcctgcctctcactcctctcatgtaagcccccagaaacagaaaggagagacatggcaacaggtctcctttggttataaactagacactcagcacttgtttctaatccagtggtgcccctggcttactgttcagtcctggataagtctcttagtttcttggtgatgatttgaacattggaaagtaaaatctgtcacttgcaaacacacagcttgtcgaaaattttttctactctgcaggaactgggccttaaaaaaatgaaaaaaaatctgtggtttcttccttctggaagctacaaacctcctgtttcttgatgggcaatcttgagtgagctctattaattattattctctttggctcagttgctaagctattttatgcatgttatgccctttgacaattagtctttagctgtaatcccccagccatcctcagaaatgtggtgaggtagccatagtgttcccaagattagaaaaaatgtaatggcagagccaagaggaaggtaaatggtccacatcttatgaagcatcatctaaatggccctattggttagagtgaggagatgcaagtagttcaatttgcttgcctagaaggcagggtactggaaaagttgttgcaattcttaattttaaactttatatatcagtaagccatatataaatatgattgggggtgtttattttaaaatctattatggaaattgagagactgacctaatctgggagaaattaaaaattacagttttcactcgttttggatttggtgttttctagggtacctaacctagatcagtggttctcaaacttaggtggatgtcagaatcacctggggagcttagtgaatgcacagggcacagtccttccacttcatgcacctggatctctgaggtctttgacaggtttccggattaatctgctatgcacaacagtgagaatcattgacctatagttactcatttgatgcatacaggaaagactgaagtataaagtgatataattggtagattgatgatagagaggtcatagaaacagtctcatcctcctttagatgagaaaatagaagttcagagaggttaagtagctggctcaaggtcagaattattgcatgcatgagattcaaacccacctttttatgctgactccacaaccaggagtcttttcactatataatttcaagaattctatagaagtagatttaaagatatgtgatggactccaccacattatagcacaactagaaatgtaattgtaatttttagcttcaactgctgaagaagtaaatattgtatattaaggtaatacggtccattttttaaaggaatacttttattttcactgaccatcatgacattagcagaatatcctgatggcttatatgcctgaaattaattttgctcttttctttcccgataggtaactgacttgaatgtccaacgcaaagcaatacatgaactcatccaagtgatggctgaactgtcgccagcagctaaaacagggaagcgaaaaaggagtcagatgctgtttcgaggtcgaagagcatcccagtaatggttgtcctgcctgcaatatttgaattttaaatctaaatctatttattaatatttaacattatttatatggggaatatatttttagactcatcaatcaaataagtatttataatagcaacttttgtgtaatgaaaatgaatatctattaatatatgtattatttataattcctatatcctgtgactgtctcacttaatcctttgttttctgactaattaggcaaggctatgtgattacaaggctttatctcaggggccaactaggcagccaacctaagcaagatcccatgggttgtgtgtttatttcacttgatgatacaatgaacacttataagtgaagtgatactatccagttactgccggtttgaaaatatgcctgcaatctgagccagtgctttaatggcatgtcagacagaacttgaatgtgtcaggtgaccctgatgaaaacatagcatctcaggagatttcatgcctggtgcttccaaatattgttgacaactgtgactgtacccaaatggaaagtaactcatttgttaaaattatcaatatctaatatatatgaataaagtgtaagttcacaactacttatgctgtgttggactttttctaagtgagacctggagtgaaagaactacctattaatgaattagtagggaggggagtcttcttagctgtggaaattttagagttgcatttggttccattaaatgtggtatttctttccactagcattttgttggctttcgcttttccagttagcagctctttgaattatctttctaagatacagatttaattatgtcactattcaattcagaggttctgctatggaatgtagtttaaactgcttagcttggcacacagagatttatttctagccccttctccaccttcctatttcctccttcatttcagaatcttcctctccctcatccaatgctggcaaacaccagtgggggtggagtagtgggtgtaagctctagggagaaggcttggattggaatccaagttattccattacaagtagtgtgacctttaatacattatgtatattgtctaagtttcagctttattgtctgaaaaagaaaaataattgtgtgttcctcataatattgtggtacgaattgattctttcactcaagaaatatttactggagtacctactacatgcctggtgctgttgtagaccttgagataccttactcaagcaaaacagccaaggatccctgcccctggggaatttgaaattaagcaagggacagataaacaatgaacaaaatacataatatgtaagtctattgcatggcattctctaaggtgattggtgtcatggaaaaatagttaaaggagagcaggacagggaaattaggagtcctatgtatggtggagtgggagggctagaggtttaaaagggtaattatatgtggccttattgaggagatgccatttgaggaagcgctttaagaagtaagagaggtagctatttgaattccaggcaaaaggtatatccttgcaaaggctctgaagagattttcctggagtggtagaagaaccagcagaccagtgtgctgggcccagaagacggaagagaaaatcagccacacttgagaggaattcaggggaagcaatgtccttaggggagggccagtttatcttttgagaaggaggaagttgaggatatgatggatttggttagttctgggctgtaaa

SEQ ID NO: 6020 - DNA, 4740 bp, Homo sapien; identical to SEQ ID NO: 1678

SEQ ID NO: 6021 - protein, 1152 aa, Homo sapien; identical to SEQ ID NO: 1679

SEQ ID NO: 6022 - DNA, 6030 bp, Homo sapien; identical to SEQ ID NO: 1146

SEQ ID NO: 6023 - protein, 239 aa, Homo sapien
MAHAGRTGYDNREIVMKYIHYKLSQRGYEWDAGDVGAAPPGAAPAPGIFSSQPGHTPHTAASRDPVARTSPLQTPAAPGAAAGPALSPVPPVVHLTLRQAGDDFSRRYRRDFAEMSRQLHLTPFTARGRFATVVEELFRDGVNWGRIVAFFEFGGVMCVESVNREMSPLVDNIALWMTEYLNRHLHTWIQDNGGWDAFVELYGPSMRPLFDFSWLSLKTLLSLALVGACITLGAYLGHK

SEQ ID NO: 6024 - DNA, 535 bp, Homo sapien
gatcatgcagctgcaccacagcaagcaccacgcggcctacgtgaacaacctgaacgtcaccgaggagaagtaccaggaggcgttggccaagggagatgttacagcccagatagctcttcagcctgcactgaagttcaatggtggtggtcatatcaatcatagcattttctggacaaacctcagccctaacggtggtggagaacccaaaggggagttgctggaagccatcaaacgtgactttggttcctttgacaagtttaaggagaagctgacggctgcatctgttggtgtccaaggctcaggttggggttggcttggtttcaataaggaacggggacacttacaaattgctgcttgtccaaatcaggatccactgcaaggaacaacaggccttattccactgctggggattgatgtgtgggagcacgcttactaccttcagtataaaaatgtcaggcctgattatctaaaagctatttggaatgtaatcaactgggagaatgtaactgaaagatacatggcttgcaaaaagtaa

SEQ ID NO: 6025 - protein, 177 aa, Homo sapien
IMQLHHSKHHAAYVNNLNVTEEKYQEALAKGDVTAQIALQPALKFNGGGHINHSIFWTNLSPNGGGEPKGELLEAIKRDFGSFDKFKEKLTAASVGVQGSGWGWLGFNKERGHLQIAACPNQDPLQGTTGLIPLLGIDVWEHAYYLQYKNVRPDYLKAIWNVINWENVTERYMACKK

SEQ ID NO: 6026 - DNA, 1890 bp, Homo sapien
aaacagagagagatagagaaagagaaagacagaggtgtttcccttagctatggaaactctataagagagatccagcttgcctcctcttgagcagtcagcaacagggtcccgtccttgacacctcagcctctacaggactgagaagaagtaaaaccgtttgctggggctggcctgactcaccagctgccatgcagcagcccttcaattacccatatccccagatctactgggtggacagcagtgccagctctccctgggcccctccaggcacagttcttccctgtccaacctctgtgcccagaaggcctggtcaaaggaggccaccaccaccaccgccaccgccaccactaccacctccgccgccgccgccaccactgcctccactaccgctgccacccctgaagaagagagggaaccacagcacaggcctgtgtctccttgtgatgtttttcatggttctggttgccttggtaggattgggcctggggatgtttcagctcttccacctacagaaggagctggcagaactccgagagtctaccagccagatgcacacagcatcatctttggagaagcaaataggccaccccagtccaccccctgaaaaaaaggagctgaggaaagtggcccatttaacaggcaagtccaactcaaggtccatgcctctggaatgggaagacacctatggaattgtcctgctttctggagtgaagtataagaagggtggccttgtgatcaatgaaactgggctgtactttgtatattccaaagtatacttccggggtcaatcttgcaacaacctgcccctgagccacaaggtctacatgaggaactctaagtatccccaggatctggtgatgatggaggggaagatgatgagctactgcactactgggcagatgtgggcccgcagcagctacctgggggcagtgttcaatcttaccagtgctgatcatttatatgtcaacgtatctgagctctctctggtcaattttgaggaatctcagacgtttttcggcttatataagctctaagagaagcactttgggattctttccattatgattctttgttacaggcaccgagaatgttgtattcagtgagggtcttcttacatgcatttgaggtcaagtaagaagacatgaaccaagtggaccttgagaccacagggttcaaaatgtctgtagctcctcaactcacctaatgtttatgagccagacaaatggaggaatatgacggaagaacatagaactctgggctgccatgtgaagagggagaagcatgaaaaagcagctacccaggtgttctacactcatcttagtgcctgagagtatttaggcagattgaaaaggacaccttttaactcacctctcaaggtgggccttgctacctcaagggggactgtctttcagatacatggttgtgacctgaggatttaagggatggaaaaggaagactagaggcttgcataataagctaaagaggctgaaagaggccaatgccccactggcagcatcttcacttctaaatgcatatcctgagccatcggtgaaactaacagataagcaagagagatgttttggggactcatttcattcctaacacagcatgtgtatttccagtgccaattgtaggggtgtgtgtgtgtgtgtgtgtgtgtgtgtatgactaaagagagaatgtagatattgtgaagtacatattaggaaaatatgggttgcatttggtcaagattttgaatgcttcctgacaatcaactctaatagtgcttaaaaatcattgattgtcagctactaatgatgttttcctataatataataaatatttatgtagatgtgcatttttgtgaaatgaaaacatgtaataaaaagtatatgttaggatacaaat

SEQ ID NO: 6027 - protein, 281 aa, Homo sapien; identical to SEQ ID NO: 2494

SEQ ID NO: 6028 - DNA, 1979 bp, Homo sapien
caggactgcctgagacaagccacaagctgaacagagaaagtggattgaacaaggacgcatttccccagtacatccacaacatgctgtccacatctcgttctcggtttatcagaaataccaacgagagcggtgaagaagtcaccaccttttttgattatgattacggtgctccctgtcataaatttgacgtgaagcaaattggggcccaactcctgcctccgctctactcgctggtgttcatctttggttttgtgggcaacatgctggtcgtcctcatcttaataaactgcaaaaagctgaagtgcttgactgacatttacctgctcaacctggccatctctgatctgctttttcttattactctcccattgtgggctcactctgctgcaaatgagtgggtctttgggaatgcaatgtgcaaattattcacagggctgtatcacatcggttattttggcggaatcttcttcatcatcctcctgacaatcgatagatacctggctattgtccatgctgtgtttgctttaaaagccaggacggtcacctttggggtggtgacaagtgtgatcacctggttggtggctgtgtttgcttctgtcccaggaatcatctttactaaatgccagaaagaagattctgtttatgtctgtggcccttattttccacgaggatggaataatttccacacaataatgaggaacattttggggctggtcctgccgctgctcatcatggtcatctgctactcgggaatcctgaaaaccctgcttcggtgtcgaaacgagaagaagaggcatagggcagtgagagtcatcttcaccatcatgattgtttactttctcttctggactccctataacattgtcattctcctgaacaccttccaggaattcttcggcctgagtaactgtgaaagcaccagtcaactggaccaagccacgcaggtgacagagactcttgggatgactcactgctgcatcaatcccatcatctatgccttcgttggggagaagttcagaaggtatctctcggtgttcttccgaaagcacatcaccaagcgcttctgcaaacaatgtccagttttctacagggagacagtggatggagtgacttcaacaaacacgccttccactggggagcaggaagtctcggctggtttataaaacgaggagcagtttgattgttgtttataaagggagataacaatctgtatataacaacaaacttcaagggtttgttgaacaatagaaacctgtaaagcaggtgcccaggaacctcagggctgtgtgtactaatacagactatgtcacccaatgcatatccaacatgtgctcagggaataatccagaaaaactgtgggtagagactttgactctccagaaagctcatctcagctcctgaaaaatgcctcattaccttgtgctaatcctctttttctagtcttcataatttcttcactcaatctctgattctgtcaatgtcttgaaatcaagggccagctggaggtgaagaagagaatgtgacaggcacagatgaatgggagtgagggatagtggggtcagggctgagaggagaaggagggagacatgagcatggctgagcctggacaaagacaaaggtgagcaaagggctcacgcattcagccaggagatgatactggtccttagccccatctgccacgtgtatttaaccttgaagggttcaccaggtcagggagagtttgggaactgcaataacctgggagttttggtggagtccgatgattctcttttgcataagtgcatgacatatttttgctttattacagtttatctatggcacccatgcaccttacatttgaaatctatgaaatatcatgctccattgttcagatgcttcttaggccacatccccctgtctaaaaattcagaaaatttttgtttataaaagatgcattatctatgatatgctaatatatgtatatgcaatataaaatttag

SEQ ID NO: 6029 - protein, 360 aa, Homo sapien; identical to SEQ ID NO: 1821

SEQ ID NO: 6030 - DNA, 1536 bp, Homo sapien
  Unsure 1101: Unknown base
atgaagctcttttggttgcttttcaccattgggttctgctgggctcagtattcctcaaatacacaacaaggacgaacatctattgttcatctgtttgaatggcgatgggttgatattgctcttgaatgtgagcgatatttagctcccaagggatttggaggggttcaggtctctccaccaaatgaaaatgttgccattcacaaccctttcagaccttggtgggaaagataccaaccagttagctataaattatgcacaagatctggaaatgaagatgaatttagaaacatggtgactagatgcaacaatgttggggttcgtatttatgtggatgctgtaattaatcatatgtgtggtaatgctgtgagtgcaggaacaagcagtacctgtggaagttacttcaaccctggaagtagggactttccagcagtcccatattctggatgggattttaatgatggtaaatgtaaaactggaagtggagatatcgagaactataatgatgctactcaggtcagagattgtcgtctgtctggtcttctcgatcttgcactggggaaggattatgtgcgttctaagattgccgaatatatgaaccatctcattgacattggtgttgcagggttcagaattgatgcttccaagcacatgtggcctggagacataaaggcaattttggacaaactgcataatctaaacagtaactggttcccggaaggtagtaaacctttcatttaccaggaggtaattgatctgggtggtgagccaattaaaagcagtgactactttggtaatggccgggtgacagaattcaagtatggtgcaaaactcggcacagttattcgcaagtggaatggagagaagatgtcttacttaaagaactggggagaaggttggggtttcatgccttctgacagagcgcttgtctttgtggataaccatgacaatcaacgaggacatggcgctggaggagcctctatacttaccttctgggatgctaggctgtacaaaatggcagttggatttatgcttgctcatccttatggatttacacgagtaatgtcaagctaccgttggccaagatattttgaaaatggaaangatgttaatgattgggttgggccaccaaatgataatggagtaactaaagaagttactattaatccagacactacttgtggcaatgactgggtctgtgaacatcgatggcgccaaataaggaacatggttaatttccgcaatgtagtggatggccagccttttacaaactggtatgataatgggagcaaccaagtggcttttgggagaggaaacagaggattcattgttttcaacaatgatgactggacattttctttaactttgcaaactggtcttcctgctggcacatactgtgatgtcatttctggagataaaattaatggcaactgcacaggcattaaaatctacgtttctgatgatggcaaagctcatttttctattagtaactctgctgaagatccatttattgcaattcatgctgaatctaaattgtaa

SEQ ID NO: 6031 - protein, 511 aa, Homo sapien
  unsure 367: unknown amino acid
MKLFWLLFTIGFCWAQYSSNTQQGRTSIVHLFEWRWVDIALECERYLAPKGFGGVQVSPPNENVAIHNPFRPWWERYQPVSYKLCTRSGNEDEFRNMVTRCNNVGVRIYVDAVINHMCGNAVSAGTSSTCGSYFNPGSRDFPAVPYSGWDFNDGKCKTGSGDIENYNDATQVRDCRLSGLLDLALGKDYVRSKIAEYMNHLIDIGVAGFRIDASKHMWPGDIKAILDKLHNLNSNWFPEGSKPFIYQEVIDLGGEPIKSSDYFGNGRVTEFKYGAKLGTVIRKWNGEKMSYLKNWGEGWGFMPSDRALVFVDNHDNQRGHGAGGASILTFWDARLYKMAVGFMLAHPYGFTRVMSSYRWPRYFENGXDVNDWVGPPNDNGVTKEVTINPDTTCGNDWVCEHRWRQIRNMVNFRNVVDGQPFTNWYDNGSNQVAFGRGNRGFIVFNNDDWTFSLTLQTGLPAGTYCDVISGDKINGNCTGIKIYVSDDGKAHFSISNSAEDPFIAIHAESKL

SEQ ID NO: 6032 - DNA, 1399 bp, Homo sapien; identical to SEQ ID NO: 299

SEQ ID NO: 6033 - protein, 346 aa, Homo sapien; identical to SEQ ID NO: 300

SEQ ID NO: 6034 - DNA, 1311 bp, Homo sapien; identical to SEQ ID NO: 1620

SEQ ID NO: 6035 - protein, 207 aa, Homo sapien; identical to SEQ ID NO: 1621

SEQ ID NO: 6036 - DNA, 1742 bp, Homo sapien; identical to SEQ ID NO: 797

SEQ ID NO: 6037 - DNA, 1051 bp, Homo sapien
ctccctccaggcagcccttggctggtccctgcgagcccgtggagactgccagagatgtcctctttcggttacaggaccctgactgtggccctcttcaccctgatctgctgtccaggatcggatgagaaggtattcgaggtacacgtgaggccaaagaagctggcggttgagcccaaagggtccctcgaggtcaactgcagcaccacctgtaaccagcctgaagtgggtggtctggagacctctctagataagattctgctggacgaacaggctcagtggaaacattacttggtctcaaacatctcccatgacacggtcctccaatgccacttcacctgctccgggaagcaggagtcaatgaattccaacgtcagcgtgtaccagcctccaaggcaggtcatcctgacactgcaacccactttggtggctgtgggcaagtccttcaccattgagtgcagggtgcccaccgtggagcccctggacagcctcaccctcttcctgttccgtggcaatgagactctgcactatgagaccttcgggaaggcagcccctgctccgcaggaggccacagccacattcaacagcacggctgacagagaggatggccaccgcaacttctcctgcctggctgtgctggacttgatgtctcgcggtggcaacatctttcacaaacactcagccccgaagatgttggagatctatgagcctgtgtcggacagccagatggtcatcatagtcacggtggtgtcggtgttgctgtccctgttcgtgacatctgtcctgctctgcttcatcttcggccagcacttgcgccagcagcggatgggcacctacggggtgcgagcggcttggaggaggctgccccaggccttccggccatagcaaccatgagtggcatggccaccaccacggtggtcactggaactcagtgtgactcctcagggttgaggtccagccctggctgaaggactgtgacaggcagcagagacttgggacattgccttttctagcccgaatacaaacacctggacttaaaaaaaaaaaaaaaaaa

SEQ ID NO: 6038 - protein, 275 aa, Homo sapien
MSSFGYRTLTVALFTLICCPGSDEKVFEVHVRPKKLAVEPKGSLEVNCSTTCNQPEVGGLETSLDKILLDEQAQWKHYLVSNISHDTVLQCHFTCSGKQESMNSNVSVYQPPRQVILTLQPTLVAVGKSFTIECRVPTVEPLDSLTLFLFRGNETLHYETFGKAAPAPQEATATFNSTADREDGHRNFSCLAVLDLMSRGGNIFHKHSAPKMLEIYEPVSDSQMVIIVTVVSVLLSLFVTSVLLCFIFGQHLRQQRMGTYGVRAAWRRLPQAFRP

SEQ ID NO: 6039 - DNA, 1296 bp, Homo sapien
gcttttgtcccccgcccgccgcttctgtccgagaggccgcccgcgaggcgcatcctgaccgcgagcgtcgggtcccagagccgggcgcggctggggcccgaggctagcatctctcgggagccgcaaggcgagagctgcaaagtttaattagacacttcagaattttgatcacctaatgttgatttcagatgtaaaagtcaagagaagactctaaaaatagcaaagatgcttttgagccagaatgccttcatcgtcagatcacttaatttggttctcatggtgtatatcagcctcgtgtttggtatttcatatgattcgcctgattacacagatgaatcttgcactttcaagatatcattgcgaaatttccggtccatcttatcatgggaattaaaaaaccactccattgtaccaactcactatacattgctgtatacaatcatgagtaaaccagaagatttgaaggtggttaagaactgtgcaaataccacaagatcattttgtgacctcacagatgagtggagaagcacacacgaggcctatgtcaccgtcctagaaggattcagcgggaacacaacgttgttcagttgctcacacaatttctggctggccatagacatgtcttttgaaccaccagagtttgagattgttggttttaccaaccacattaatgtgatggtgaaatttccatctattgttgaggaagaattacagtttgatttatctctcgtcattgaagaacagtcagagggaattgttaagaagcataaacccgaaataaaaggaaacatgagtggaaatttcacctatatcattgacaagttaattccaaacacgaactactgtgtatctgtttatttagagcacagtgatgagcaagcagtaataaagtctcccttaaaatgcaccctccttccacctggccaggaatcagaatcagcagaatctgccaaaataggaggaataattactgtgtttttgatagcattggtcttgacaagcaccatagtgacactgaaatggattggttatatatgcttaagaaatagcctccccaaagtcttgaggcaaggtctcactaagggctggaatgcagtggctattcacaggtgcagtcataatgcactacagtctgaaactcctgagctcaaacagtcgtcctgcctaagcttccccagtagctgggattacaagcgtgcatccctgtgccccagtgattaagttttattatgtagaaaataaagagcaaacagttacaaaagaaaaaaaaaaaaaaaaaaaaaaaaaaaaaaaaaa

SEQ ID NO: 6040 - protein, 331 aa, Homo sapien
MLLSQNAFIVRSLNLVLMVYISLVFGISYDSPDYTDESCTFKISLRNFRSILSWELKNHSIVPTHYTLLYTIMSKPEDLKVVKNCANTTRSFCDLTDEWRSTHEAYVTVLEGFSGNTTLFSCSHNFWLAIDMSFEPPEFEIVGFTNHINVMVKFPSIVEEELQFDLSLVIEEQSEGIVKKHKPEIKGNMSGNFTYIIDKLIPNTNYCVSVYLEHSDEQAVIKSPLKCTLLPPGQESESAESAKIGGIITVFLIALVLTSTIVTLKWIGYICLRNSLPKVLRQGLTKGWNAVAIHRCSHNALQSETPELKQSSCLSFPSSWDYKRASLCPSD

SEQ ID NO: 6041 - DNA, 4910 bp, Homo sapien
tagacgcaccctctgaagatggtgactccctcctgagaagctggaccccttggtaaaagacaaggccttctccaagaagaatatgaaagtgttactcagacttatttgtttcatagctctactgatttcttctctggaggctgataaatgcaaggaacgtgaagaaaaaataattttagtgtcatctgcaaatgaaattgatgttcgtccctgtcctcttaacccaaatgaacacaaaggcactataacttggtataaagatgacagcaagacacctgtatctacagaacaagcctccaggattcatcaacacaaagagaaactttggtttgttcctgctaaggtggaggattcaggacattactattgcgtggtaagaaattcatcttactgcctcagaattaaaataagtgcaaaatttgtggagaatgagcctaacttatgttataatgcacaagccatatttaagcagaaactacccgttgcaggagacggaggacttgtgtgcccttatatggagttttttaaaaatgaaaataatgagttacctaaattacagtggtataaggattgcaaacctctacttcttgacaatatacactttagtggagtcaaagataggctcatcgtgatgaatgtggctgaaaagcatagagggaactatacttgtcatgcatcctacacatacttgggcaagcaatatcctattacccgggtaatagaatttattactctagaggaaaacaaacccacaaggcctgtgattgtgagcccagctaatgagacaatggaagtagacttgggatcccagatacaattgatctgtaatgtcaccggccagttgagtgacattgcttactggaagtggaatgggtcagtaattgatgaagatgacccagtgctaggggaagactattacagtgtggaaaatcctgcaaacaaaagaaggagtaccctcatcacagtgcttaatatatcggaaattgaaagtagattttataaacatccatttacctgttttgccaagaatacacatggtatagatgcagcatatatccagttaatatatccagtcactaatttccagaagcacatgattggtatatgtgtcacgttgacagtcataattgtgtgttctgttttcatctataaaatcttcaagattgacattgtgctttggtacagggattcctgctatgattttctcccaataaaagcttcagatggaaagacctatgacgcatatatactgtatccaaagactgttggggaagggtctacctctgactgtgatatttttgtgtttaaagtcttgcctgaggtcttggaaaaacagtgtggatataagctgttcatttatggaagggatgactacgttggggaagacattgttgaggtcattaatgaaaacgtaaagaaaagcagaagactgattatcattttagtcagagaaacatcaggcttcagctggctgggtggttcatctgaagagcaaatagccatgtataatgctcttgttcaggatggaattaaagttgtcctgcttgagctggagaaaatccaagactatgagaaaatgccagaatcgattaaattcattaagcagaaacatggggctatccgctggtcaggggactttacacagggaccacagtctgcaaagacaaggttctggaagaatgtcaggtaccacatgccagtccagcgacggtcaccttcatctaaacaccagttactgtcaccagccactaaggagaaactgcaaagagaggctcacgtgcctctcgggtagcatggagaagttgccaagagttctttaggtgcctcctgtcttatggcgttgcaggccaggttatgcctcatgctgacttgcagagttcatggaatgtaactatatcatcctttatccctgaggtcacctggaatcagattattaagggaataagccatgacgtcaatagcagcccagggcacttcagagtagagggcttgggaagatcttttaaaaaggcagtaggcccggtgtggtggctcacgcctataatcccagcactttgggaggctgaagtgggtggatcaccagaggtcaggagttcgagaccagcccagccaacatggcaaaaccccatctctactaaaaatacaaaaatgagctaggcatggtggcacacgcctgtaatcccagctacacctgaggctgaggcaggagaattgcttgaaccggggagacggaggttgcagtgagccgagtttgggccactgcactctagcctggcaacagagcaagactccgtctcaaaaaaagggcaataaatgccctctctgaatgtttgaactgccaagaaaaggcatggagacagcgaactagaagaaagggcaagaaggaaatagccaccgtctacagatggcttagttaagtcatccacagcccaagggcggggctatgccttgtctggggaccctgtagagtcactgaccctggagcggctctcctgagaggtgctgcaggcaaagtgagactgacacctcactgaggaagggagacatattcttggagaactttccatctgcttgtattttccatacacatccccagccagaagttagtgtccgaagaccgaattttattttacagagcttgaaaactcacttcaatgaacaaagggattctccaggattccaaagttttgaagtcatcttagctttccacaggagggagagaacttaaaaaagcaacagtagcagggaattgatccacttcttaatgctttcctccctggcatgaccatcctgtcctttgttattatcctgcattttacgtctttggaggaacagctccctagtggcttcctccgtctgcaatgtcccttgcacagcccacacatgaaccatccttcccatgatgccgctcttctgtcatcccgctcctgctgaaacacctcccaggggctccacctgttcaggagctgaagcccatgctttcccaccagcatgtcactcccagaccacctccctgccctgtcctccagcttcccctcgctgtcctgctgtgtgaattcccaggttggcctggtggccatgtcgcctgcccccagcactcctctgtctctgctcttgcctcgacccttcctcctcctttgcctaggaggccttctcgcattttctctagctgatcagaattttaccaaaattcagaacatcctccaattccacagtctctgggagactttccctaagaggcgacttcctctccagccttctctctctggtcaggcccactgcagagatggtggtgagcacatctgggaggctggtctccctccagctggaattgctgctctctgagggagaggctgtggtggctgtctctgtccctcactgccttccaggagcaatttgcacatgtaacatagatttatgtaatgctttatgtttaaaaacattccccaattatcttatttaatttttgcaattattctaattttatatatagagaaagtgacctattttttaaaaaaatcacactctaagttctattgaacctaggacttgagcctccatttctggcttctagtctggtgttctgagtacttgatttcaggtcaataacggtcccccctcactccacactggcacgtttgtgagaagaaatgacattttgctaggaagtgaccgagtctaggaatgcttttattcaagacaccaaattccaaacttctaaatgttggaattttcaaaaattgtgtttagattttatgaaaaactcttctactttcatctattctttccctagaggcaaacatttcttaaaatgtttcattttcattaaaaatgaaagccaaatttatatgccaccgattgcaggacacaagcacagttttaagagttgtatgaacatggagaggacttttggtttttatatttctcgtatttaatatgggtgaacaccaacttttatttggaataataattttcctcctaaacaaaaacacattgagtttaagtctctgactcttgcctttccacctgctttctcctgggcccgctttgcctgcttgaaggaacagtgctgttctggagctgctgttccaacagacagggcctagctttcatttgacacacagactacagccagaagcccatggagcagggatgtcacgtcttgaaaagcctattagatgttttacaaatttaattttgcagattattttagtctgtcatccagaaaatgtgtcagcatgcatagtgctaagaaagcaagccaatttggaaacttaggttagtgacaaaattggccagagagtgggggtgatgatgaccaagaattacaagtagaatggcagctggaatttaaggagggacaagaatcaatggataagcgtgggtggaggaagatccaaacagaaaagtgcaaagttattccccatcttccaagggttgaattctggaggaagaagacacattcctagttccccgtgaacttcctttgacttattgtccccactaaaacaaaacaaaaaacttttaatgccttccacattaattagattttcttgcagtttttttatggcatttttttaaagatgccctaagtgttgaagaagagtttgcaaatgcaacaaaaatatttaattaccggttgttaaaactggtttagcacaatttatattttccctctcttgcctttcttatttgcaataaaaggtattgagccattttttaaatgacatttttgataaattatgtttgtactagttgatgaaggagttttttttaacctgtttatataattttgcagcagaagccaaattttttgtatattaaagcaccaaattcatgtacagcatgcatcacggatcaatagactgtacttattttccaataaaattttcaaactttgtactgttaaa

SEQ ID NO: 6042 - protein, 569 aa, Homo sapien
MKVLLRLICFIALLISSLEADKCKEREEKIILVSSANEIDVRPCPLNPNEHKGTITWYKDDSKTPVSTEQASRIHQHKEKLWFVPAKVEDSGHYYCVVRNSSYCLRIKISAKFVENEPNLCYNAQAIFKQKLPVAGDGGLVCPYMEFFKNENNELPKLQWYKDCKPLLLDNIHFSGVKDRLIVMNVAEKHRGNYTCHASYTYLGKQYPITRVIEFITLEENKPTRPVIVSPANETMEVDLGSQIQLICNVTGQLSDIAYWKWNGSVIDEDDPVLGEDYYSVENPANKRRSTLITVLNISEIESRFYKHPFTCFAKNTHGIDAAYIQLIYPVTNFQKHMIGICVTLTVIIVCSVFIYKIFKIDIVLWYRDSCYDFLPIKASDGKTYDAYILYPKTVGEGSTSDCDIFVFKVLPEVLEKQCGYKLFIYGRDDYVGEDIVEVINENVKKSRRLIIILVRETSGFSWLGGSSEEQIAMYNALVQDGIKVVLLELEKIQDYEKMPESIKFIKQKHGAIRWSGDFTQGPQSAKTRFWKNVRYHMPVQRRSPSSKHQLLSPATKEKLQREAHVPLG

SEQ ID NO: 6043 - DNA, 4035 bp, Homo sapien
gcagccagagctcagcagggccctggagagatggccacggtcccagcaccggggaggactggagagcgcgcgctgccaccgccccatgtctcagccagggcttccttcctcggctccaccctgtggatgtaatggcggcccctgctctgtcctggcgtctgcccctcctcatcctcctcctgcccctggctacctcttgggcatctgcagcggtgaatggcacttcccagttcagatgcttctacaactcgagagccaacatctcctgtctctggagccaagatggggctctgcaggacacttcctgccaagtccatgcctggccggacagacggcggtggaaccaaacctgtgagctgctccccgtgagtcaagcatcctgggcctgcaacctgatcctcggagccccagattctcagaaactgaccacagttgacatcgtcaccctgagggtgctgtgccgtgagggggtgcgatggagggtgatggccatccaggacttcaagccctttgagaaccttcgcctgatggcccccatctccctccaagttgtccacgtggagacccacagatggaacataagctgggaaatctcccaagcctcccactactttgaaagacacctggagttcgaggcccggacgctgtccccaggccacacctgggaggaggcccccctgctgactctcaagcagaagcaggaatggatctgcctggagacgctcaccccagacacccagtatgagtttcaggtgcgggtcaagcctctgcaaggcgagttcacgacctggagcccctggagccagcccctggccttcaggacaaagcctgcagcccttgggaaggacaccattccgtggctcggccacctcctcgtgggcctcagcggggcttttggcttcatcatcttagtgtacttgctgatcaactgcaggaacaccgggccatggctgaagaagctcctgaagtgtaacaccccagacccctcgaagttcttttcccagctgagctcagagcatggaggagacgtccagaagtggctctcttcgcccttcccctgatcgtccttcagccctggcggcctggcacctgagatctcgccactagaagtgctggagagggacaaggtgacgcagctgctcctgcagcaggacaaggtgcctgagcccgcatccttaagcagcaaccactcgctgaccagctgcttcaccaaccagggttacttcttcttccacctcccggatgccttggagatagaggcctgccaggtgtactttacttacgacccctactcagaggaagaccctgatgagggtgtggccggggcacccacagggtcttccccccaacccctgcagcctctgtcaggggaggacgacgcctactgcaccttcccctccagggatgacctgctgctcttctcccccagtctcctcggtggccccagccccccaagcactgcccctgggggcagtggggccggtgaagagaggatgcccccttctttgcaagaaagagtccccagagactgggacccccagcccctggggcctcccaccccaggagtcccagacctggtggattttcagccaccccctgagctggtgctgcgagaggctggggaggaggtccctgacgctggccccagggagggagtcagtttcccctggtccaggcctcctgggcagggggagttcagggcccttaatgctcgcctgcccctgaacactgatgcctacttgtccctccaagaactccagggtcaggacccaatccacttggtgtagacagatggccagggtgggaggcaggcagctgcctgctctgcgccgagcctcagaaggaccctgttgagggtcctcagtccactgctgaggacactcagtgtccagttgcagctggacttctccacccggatggcccccacccagtcctgcacacttggtccatccatttccaaacctccactgctgctcccgggtcctgctgcccgagccaggaactgtgtgtgttgcaggggggcagtaactccccaactccctcgttaatcacaggatcccacgaatttaggctcagaagcatcgctcctctccagccctgcagctattcaccaatatcagtcctcgcggctctccagggctccctgccctgacctcttccctgggttttctgccccagcctcctccttccctcccctccccgtccacagggcagcctgagcgtgctttccaaaacccaaatatggccacgctccccctcggttcaaaaccttgcacaggtcccactgccctcagccccacttctcagcctggtacttgtacctccggtgtcgtgtggggacatccccttctgcaatcctccctaccgtcctcccgagccactcagagctccctcacaccccctctgttgcacatgctattccctggggctgctgtgcgctccccctcatctaggtgacaaacttccctgactcttcaagtgccggttttgcttctcctggagggaagcactgcctcccttaatctgccagaaacttctagcgtcagtgctggagggagaagctgtcagggacccagggcgcctggagaaagaggccctgttactattcctttgggatctctgaggcctcagagtgcttggctgctgtatctttaatgctggggcccaagtaagggcacagatccccccgacaaagtggatgcctgctgcatcttcccacagtggcttcacagacccacaagagaagctgatggggagtaaaccctggagtccgaggcccaggcagcagccccgcctagtggtgggccctgatgctgccaggcctgggacctcccactgccccctccactggaggggtctcctctgcagctcagggactggcacactggcctccagaagggcagctccacagggcagggcctcattatttttcactgccccagacacagtgcccaacaccccgtcgtataccctggatgaacgaattaattacctggcaccacctcgtctgggctccctgcgcctgacattcacacagagaggcagagtcccgtgcccattaggtctggcatgccccctcctgcaaggggctcaaccccctaccccgacccctccacgtatctttcctaggcagatcacgttgcaatggctcaaacaacattccaccccagcaggacagtgaccccagtcccagctaactctgacctgggagccctcaggcacctgcacttacaggccttgctcacagctgattgggcacctgaccacacgcccccacaggctctgaccagcagcctatgagggggtttggcaccaagctctgtccaatcaggtaggctgggcctgaactagccaatcagatcaactctgtcttgggcgtttgaactcagggagggaggcccttgggagcaggtgcttgtggacaaggctccacaagcgttgagccttggaaaggtagacaagcgttgagccactaagcagaggaccttgggttcccaatacaaaaatacctactgctgagagggctgctgaccatttggtcaggattcctgttgcctttatatccaaaataaactcccctttcttgaggttgtctgagtcttgggtctatgccttgaaaaaagctgaattattggacagtctcacctcctgccatagggtcctgaatgtttcagaccacaaggggctccacacctttgctgtgtgttctggggcaacctactaatcctctctgcaagtcggtctccttatccccccaaatggaaattgtatttgccttctccactttgggaggctcccacttcttgggagggttacattttttaagtcttaatcatttgtgacatatgtatctatacatccgtatcttttaatgatccgtgtgtaccatctttgtgattatttccttaatattttttctttaagtcagttcattttcgttgaaatacatttataaagaaaaatctttgttactctgtaaatgaaaaaacccattttcgctataaataaaaggtaactgtacaaaataagtacaat

SEQ ID NO: 6044 - protein, 309 aa, Homo sapien
MAAPALSWRLPLLILLLPLATSWASAAVNGTSQFRCFYNSRANISCLWSQDGALQDTSCQVHAWPDRRRWNQTCELLPVSQASWACNLILGAPDSQKLTTVDIVTLRVLCREGVRWRVMAIQDFKPFENLRLMAPISLQVVHVETHRWNISWEISQASHYFERHLEFEARTLSPGHTWEEAPLLTLKQKQEWICLETLTPDTQYEFQVRVKPLQGEFTTWSPWSQPLAFRTKPAALGKDTIPWLGHLLVGLSGAFGFIILVYLLINCRNTGPWLKKLLKCNTPDPSKFFSQLSSEHGGDVQKWLSSPFP

SEQ ID NO: 6045 - DNA, 816 bp, Homo sapien
atgcactttctttgccaaaggcaaacgcagaacgtttcagagccatgaggatgcttctgcatttgagtttgctagctcttggagctgcctacgtgtatgccatccccacagaaattcccacaagtgcattggtgaaagagaccttggcactgctttctactcatcgaactctgctgatagccaatgagactctgaggattcctgttcctgtacataaaaatcaccaactgtgcactgaagaaatctttcagggaataggcacactggagagtcaaactgtgcaagggggtactgtggaaagactattcaaaaacttgtccttaataaagaaatacattgacggccaaaaaaaaaagtgtggagaagaaagacggagagtaaaccaattcctagactacctgcaagagtttcttggtgtaatgaacaccgagtggataatagaaagttgagactaaactggtttgttgcagccaaagattttggaggagaaggacattttactgcagtgagaatgagggccaagaaagagtcaggccttaattttcaatataatttaacttcagagggaaagtaaatatttcaggcatactgacactttgccagaaagcataaaattcttaaaatatatttcagatatcagaatcattgaagtattttcctccaggcaaaattgatatacttttttcttatttaacttaacattctgtaaaatgtctgttaacttaatagtatttatgaaatggttaagaatttggtaaattagtatttatttaatgttatgttgtgttctaataaaacaaaaatagacaactgttc

SEQ ID NO: 6046 - protein, 134 aa, Homo sapien
MRMLLHLSLLALGAAYVYAIPTEIPTSALVKETLALLSTHRTLLIANETLRIPVPVHKNHQLCTEEIFQGIGTLESQTVQGGTVERLFKNLSLIKKYIDGQKKKCGEERRRVNQFLDYLQEFLGVMNTEWIIES

SEQ ID NO: 6047 - DNA, 3805 bp, Homo sapien
gaattccgggccgcttagtgttgaatgttccccaccgagagcgcatggcttgggaagcgaggcgcgaacccgggccccgaagccgccgtccgggagacggtgatgctgttgctgtgcctgggggtcccgaccggccgcccctacaacgtggacactgagagcgcgctgctttaccagggcccccacaacacgctgttcggctactcggtcgtgctgcacagccacggggcgaaccgatggctcctagtgggtgcgcccactgccaactggctcgccaacgcttcagtgatcaatcccggggcgatttacagatgcaggatcggaaagaatcccggccagacgtgcgaacagctccagctgggtagccctaatggagaaccttgtggaaagacttgtttggaagagagagacaatcagtggttgggggtcacactttccagacagccaggagaaaatggatccatcgtgacttgtgggcatagatggaaaaatatattttacataaagaatgaaaataagctccccactggtggttgctatggagtgccccctgatttacgaacagaactgagtaaaagaatagctccgtgttatcaagattatgtgaaaaaatttggagaaaattttgcatcatgtcaagctggaatatccagtttttacacaaaggatttaattgtgatgggggccccaggatcatcttactggactggctctctttttgtctacaatataactacaaataaatacaaggcttttttagacaaacaaaatcaagtaaaatttggaagttatttaggatattcagtcggagctggtcattttcggagccagcatactaccgaagtagtcggaggagctcctcaacatgagcagattggtaaggcatatatattcagcattgatgaaaaagaactaaatatcttacatgaaatgaaaggtaaaaagcttggatcgtactttggagcttctgtctgtgctgtggacctcaatgcagatggcttctcagatctgctcgtgggagcacccatgcagagcaccatcagagaggaaggaagagtgtttgtgtacatcaactctggctcgggagcagtaatgaatgcaatggaaacaaacctcgttggaagtgacaaatatgctgcaagatttggggaatctatagttaatcttggcgacattgacaatgatggctttgaagatgttgctatcggagctccacaagaagatgacttgcaaggtgctatttatatttacaatggccgtgcagatgggatctcgtcaaccttctcacagagaattgaaggacttcagatcagcaaatcgttaagtatgtttggacagtctatatcaggacaaattgatgcagataataatggctatgtagatgtagcagttggtgcttttcggtctgattctgctgtcttgctaaggacaagacctgtagtaattgttgacgcttctttaagccaccctgagtcagtaaatagaacgaaatttgactgtgttgaaaatggatggccttctgtgtgcatagatctaacactttgtttctcatataagggcaaggaagttccaggttacattgttttgttttataacatgagtttggatgtgaacagaaaggcagagtctccaccaagattctatttctcttctaatggaacttctgacgtgattacaggaagcatacaggtgtccagcagagaagctaactgtagaacacatcaagcatttatgcggaaagatgtgcgggacatcctcaccccaattcagattgaagctgcttaccaccttggtcctcatgtcatcagtaaacgaagtacagaggaattcccaccacttcagccaattcttcagcagaagaaagaaaaagacataatgaaaaaaacaataaactttgcaaggttttgtgcccatgaaaattgttctgctgatttacaggtttctgcaaagattgggtttttgaagccccatgaaaataaaacatatcttgctgttgggagtatgaagacattgatgttgaatgtgtccttgtttaatgctggagatgatgcatatgaaacgactctacatgtcaaactacccgtgggtctttatttcattaagattttagagctggaagagaagcaaataaactgtgaagtcacagataactctggcgtggtacaacttgactgcagtattggctatatatatgtagatcatctctcaaggatagatattagctttctcctggatgtgagctcactcagcagagcggaagaggacctcagtatcacagtgcatgctacctgtgaaaatgaagaggaaatggacaatctaaagcacagcagagtgactgtagcaatacctttaaaatatgaggttaagctgactgttcatgggtttgtaaacccaacttcatttgtgtatggatcaaatgatgaaaatgagcctgaaacgtgcatggtggagaaaatgaacttaactttccatgttatcaacactggcaatagtatggctcccaatgttagtgtggaaataatggtaccaaattcttttagcccccaaactgataagctgttcaacattttggatgtccagactactactggagaatgccactttgaaaattatcaaagagtgtgtgcattagagcagcaaaagagtgcaatgcagaccttgaaaggcatagtccggttcttgtccaagactgataagaggctattgtactgcataaaagctgatccacattgtttaaatttcttgtgtaattttgggaaaatggaaagtggaaaagaagccagtgttcatatccaactggaaggccggccatccattttagaaatggatgagacttcagcactcaagtttgaaataagagcaacaggttttccagagccaaatccaagagtaattgaactaaacaaggatgagaatgttgcgcatgttctactggaaggactacatcatcaaagacccaaacgttatttcaccatagtgattatttcaagtagcttgctacttggacttattgtacttctgttgatctcatatgttatgtggaaggctggcttctttaaaagacaatacaaatctatcctacaagaagaaaacagaagagacagttggagttatatcaacagtaaaagcaatgatgattaaggacttctttcaaattgagagaatggaaaacagactcaggttgtagtaaagaaatttaaaagacactgtttacaagaaaaaatgaattttgtttggacttcttttactcatgatcttgtgacatattatgtcttcatgcaaggggaaaatctcagcaatgattactctttgagatagaagaactgcaaaggtaataatacagccaaagataatctctcagcttttaaatgggtagagaaacactaaagcattcaatttattcaagaaaagtaagcccttgaagatatcttgaaatgaaagtataactgagttaaattatactggagaagtcttagacttgaaatactacttaccatatgtgcttgcctcagtaaaatgaaccccactgggtgggcagaggttcatttcaaatacatctttgatacttgttcaaaatatgttctttaaaaatataattttttagagagctgttcccaaattttctaacgagtggaccattatcactttaaagccctttatttataatacatttcctacgggctgtgttccaacaaccattttttttcagcagactatgaatattatagtattataggccaaactggcaaacttcagactgaacatgtacactggtttgagcttagtgaaatgacttccggaatct

SEQ ID NO: 6048 - protein, 1038 aa, Homo sapien; identical to SEQ ID NO: 1697

SEQ ID NO: 6049 - DNA, 2742 bp, Homo sapien
agcccagagagaaagtctgacttgccccacagccagtgagtgactgcagcagcaccagaatctggtctgtttcctgtttggctcttctaccactacggcttgggatctcgggcatggtggctttgccaatggtccttgttttgctgctggtcctgagcagaggtgagagtgaattggacgccaagatcccatccacaggggatgccacagaatggcggaatcctcacctgtccatgctggggtcctgccagccagccccctcctgccagaagtgcatcctctcacaccccagctgtgcatggtgcaagcaactgaacttcaccgcgtcgggagaggcggaggcgcggcgctgcgcccgacgagaggagctgctggctcgaggctgcccgctggaggagctggaggagccccgcggccagcaggaggtgctgcaggaccagccgctcagccagggcgcccgcggagagggtgccacccagctggcgccgcagcgggtccgggtcacgctgcggcctggggagccccagcagctccaggtccgcttccttcgtgctgagggatacccggtggacctgtactaccttatggacctgagctactccatgaaggacgacctggaacgcgtgcgccagctcgggcacgctctgctggtccggctgcaggaagtcacccattctgtgcgcattggttttggttcctttgtggacaaaacggtgctgccctttgtgagcacagtaccctccaaactgcgccacccctgccccacccggctggagcgctgccagtcaccattcagctttcaccatgtgctgtccctgacgggggacgcacaagccttcgagcgggaggtggggcgccagagtgtgtccggcaatctggactcgcctgaaggtggcttcgatgccattctgcaggctgcactctgccaggagcagattggctggagaaatgtgtcccggctgctggtgttcacttcagacgacacattccatacagctggggacgggaagttgggcggcattttcatgcccagtgatgggcactgccacttggacagcaatggcctctacagtcgcagcacagagtttgactacccttctgtgggtcaggtagcccaggccctctctgcagcaaatatccagcccatctttgctgtcaccagtgccgcactgcctgtctaccaggagctgagtaaactgattcctaagtctgcagttggggagctgagtgaggactccagcaacgtggtacagctcatcatggatgcttataatagcctgtcttccactgtgacccttgaacactcttcactccctcctggggtccacatttcttacgaatcccagtgtgagggtcctgagaagagggagggtaaggctgaggatcgaggacagtgcaaccacgtccgaatcaaccagacggtgactttctgggtttctctccaagccacccactgcctcccagagccccatctcctgaggctccgggcccttggcttctcagaggagctgattgtggagttgcacacgctgtgtgactgtaattgcagtgacacccagccccaggctccccactgcagtgatggccagggacacctacaatgtggtgtatgcagctgtgcccctggccgcctaggtcggctctgtgagtgctctgtggcagagctgtcctccccagacctggaatctgggtgccgggctcccaatggcacagggcccctgtgcagtggaaagggtcactgtcaatgtggacgctgcagctgcagtggacagagctctgggcatctgtgcgagtgtgacgatgccagctgtgagcgacatgagggcatcctctgcggaggctttggtcgctgccaatgtggagtatgtcactgtcatgccaaccgcacgggcagagcatgcgaatgcagtggggacatggacagttgcatcagtcccgagggagggctctgcagtgggcatggacgctgcaaatgcaaccgctgccagtgcttggacggctactatggtgctctatgcgaccaatgcccaggctgcaagacaccatgcgagagacaccgggactgtgcagagtgtggggccttcaggactggcccactggccaccaactgcagtacagcttgtgcccataccaatgtgaccctggccttggcccctatcttggatgatggctggtgcaaagagcggaccctggacaaccagctgttcttcttcttggtggaggatgacgccagaggcacggtcgtgctcagagtgagaccccaagaaaagggagcagaccacacgcaggccattgtgctgggctgcgtagggggcatcgtggcagtggggctggggctggtcctggcttaccggctctcggtggaaatctatgaccgccgggaatacagtcgctttgagaaggagcagcaacaactcaactggaagcaggacagtaatcctctctacaaaagtgccatcacgaccaccatcaatcctcgctttcaagaggcagacagtcccactctctgaaggagggagggacacttacccaaggctcttctccttggaggacagtgggaactggagggtgagaggaagggtgggtctgtaagaccttggtaggggactaattcactggcgaggtgcggccaccaccctacttcattttcagagtgacacccaagagggctgcttcccatgcctgcaaccttgcatccatctgggctaccccacccaagtatacaataaagtcttacctcag

SEQ ID NO: 6050 - protein, 798 aa, Homo sapien; identical to SEQ ID NO: 1667

SEQ ID NO: 6051 - DNA, 2722 bp, Homo sapien
gagcgggctgagggtaggaagtagccgctccgagtggaggcgactgggggctgaagagcgcgccgccctctcgtcccactttccaggtgtgtgatcctgtaaaattaaatcttccaagatgatctggtatatattaattataggaattctgcttccccagtctttggctcatccaggcttttttacttcaattggtcagatgactgatttgatccatactgagaaagatctggtgacttctctgaaagattatattaaggcagaagaggacaagttagaacaaataaaaaaatgggcagagaagttagatcggctaactagtacagcgacaaaagatccagaaggatttgttgggcatccagtaaatgcattcaaattaatgaaacgtctgaatactgagtggagtgagttggagaatctggtccttaaggatatgtcagatggctttatctctaacctaaccattcagagaccagtactttctaatgatgaagatcaggttggggcagccaaagctctgttacgtctccaggatacctacaatttggatacagataccatctcaaagggtaatcttccaggagtgaaacacaaatcttttctaacggctgaggactgctttgagttgggcaaagtggcctatacagaagcagattattaccatacggaactgtggatggaacaagccctaaggcaactggatgaaggcgagatttctaccatagataaagtctctgttctagattatttgagctatgcggtatatcagcagggagacctggataaggcacttttgctcacaaagaagcttcttgaactagatcctgaacatcagagagctaatggtaacttaaaatattttgagtatataatggctaaagaaaaagatgtcaataagtctgcttcagatgaccaatctgatcagaaaactacaccaaagaaaaaaggggttgctgtggattacctgccagagagacagaagtacgaaatgctgtgccgtggggagggtatcaaaatgacccctcggagacagaaaaaactcttttgccgctaccatgatggaaaccgtaatcctaaatttattctggctccagctaaacaggaggatgaatgggacaagcctcgtattattcgcttccatgatattatttctgatgcagaaattgaaatcgtcaaagacctagcaaaaccaaggctgagccgagctacagtacatgaccctgagactggaaaattgaccacagcacagtacagagtatctaagagtgcctggctctctggctatgaaaatcctgtggtgtctcgaattaatatgagaatacaagatctaacaggactagatgtttccacagcagaggaattacaggtagcaaattatggagttggaggacagtatgaaccccattttgactttgcacggaaagatgagccagatgctttcaaagagctggggacaggaaatagaattgctacatggctgttttatatgagtgatgtgtctgcaggaggagccactgtttttcctgaagttggagctagtgtttggcccaaaaaaggaactgctgttttctggtataatctgtttgccagtggagaaggagattatagtacacggcatgcagcctgtccagtgctagttggcaacaaatgggtatccaataaatggctccatgaacgtggacaagaatttcgaagaccttgtacgttgtcagaattggaatgacaaacaggcttccctttttctcctattgttgtactcttatgtgtctgatatacacatttccatagtcttaactttcaggagtttacaattgactaacactccatgattgattcagtcatgaacctcatcccatgtttcatctgtggacaattgcttactttgtgggttcttttaaaagtaacacgaaatcatcatattgcataaaaccttaaagttctgttggtatcacagaagacaaggcagagtttaaagtgaggaattttatatttaaagaactttttggttggataaaaacataatttgagcatccagttttagtatttcactacatctcagttggtgggtgttaagctagaatgggctgtgtgataggaaacaaatgccttacagatgtgcctaggtgttctgtttacctagtgtcttactctgttttctggatctgaagactagtaataaactaggacactaactgggttccatgtgattgccctttcatatgatcttctaagttgatttttttcctcccaagtcttttttaaagaaagtatactgtattttaccaaccccctctcttttcttttagctcctctgtggtgaattaaacgtacttgagttaaaatatttcgattttttttttttttttaatggaaagtcctgcataacaacactgggccttcttaactaaaatgctcaccacttagcctgtttttttatcccttttttaaaatgacagatgattttgttcaggaattttgctgtttttcttagtgctaataccttgcctcttattcctgctacagcagggtggtaatattggcattctgattaaatactgtgccttaggagactggaagtttaaaaatgtacaagtcctttcagtgatgagggaattgattttttttaaaagtctttttcttagaaagccaaaatgtttgtttttttaagattctgaaatgtgttgtgacaacaatgacctatttatgatcttaaatctttttt

SEQ ID NO: 6052 - protein, 534 aa, Homo sapien
MIWYILIIGILLPQSLAHPGFFTSIGQMTDLIHTEKDLVTSLKDYIKAEEDKLEQIKKWAEKLDRLTSTATKDPEGFVGHPVNAFKLMKRLNTEWSELENLVLKDMSDGFISNLTIQRPVLSNDEDQVGAAKALLRLQDTYNLDTDTISKGNLPGVKHKSFLTAEDCFELGKVAYTEADYYHTELWMEQALRQLDEGEISTIDKVSVLDYLSYAVYQQGDLDKALLLTKKLLELDPEHQRANGNLKYFEYIMAKEKDVNKSASDDQSDQKTTPKKKGVAVDYLPERQKYEMLCRGEGIKMTPRRQKKLFCRYHDGNRNPKFILAPAKQEDEWDKPRIIRFHDIISDAEIEIVKDLAKPRLSRATVHDPETGKLTTAQYRVSKSAWLSGYENPVVSRINMRIQDLTGLDVSTAEELQVANYGVGGQYEPHFDFARKDEPDAFKELGTGNRIATWLFYMSDVSAGGATVFPEVGASVWPKKGTAVFWYNLFASGEGDYSTRHAACPVLVGNKWVSNKWLHERGQEFRRPCTLSELE

SEQ ID NO: 6053 - DNA, 3636 bp, Homo sapien
gttctgaatgatgactgacgcgggtttgggtgatacccctcacagcccctgtcattccggagtcataaggcacccgcgcgtctagccccagcgccagggcacgcgagcggcgccgcagggaggaaagcttccgcctgcgggccggacaaaagtcccgcctgcccacggctttttgcccgccgctcgtgaccgagacgcctcgccgcggccagctcgctgctctcgctggcggatggtgtgtggccgccgcaggacgcccgccgtgcccgggccatgaagtagcggctgctggcggcgccgctgcccaaccgccagccccagccccgcgctgcgctgcccggtcctctcccggcggggtcgtatcggcgtggacatggctggccgcgtccctagcctgctagttctccttgtttttccaagcagctgtttggctttccgaagcccactttctgtctttaagaggtttaaagaaactaccagaccattttccaatgaatgtcttggtaccaccagacccgtagttcctattgattcatcagattttgcattggatattcgcatgcctggggttacacctaaacagtccgatacatacttctgcatgtctatgcgaataccagtggatgaggaagccttcgtgattgacttcaagcctcgagccagcatggatactgtccatcacatgttactttttggatgcaatatgccttcatccactggaagttactggttttgtgatgaaggaacctgtacagataaagccaatattctgtatgcctgggcgagaaatgctccccctacccggctccccaaaggtgttggattcagagttggaggagagactggaagtaaatactttgtactacaggtacactatggggatattagtgcttttagagataataacaaggactgttctggtgtgtccttacacctcacacgtctgccacagcctttaattgctggcatgtaccttatgatgtctgttgacactgttatcccagcaggagaaaaagtggtgaattctgacatttcatgccattataaaaattatccaatgcatgtctttgcctatagagttcacactcaccatttaggtaaggtagtaagtggatacagagtaagaaatggacagtggacactgattggacggcagagccctcagctgccacaggctttctaccctgtggggcatccagttgatgtaagttttggtgacctactggctgcaagatgtgtattcactggtgaaggaaggacagaagccacacacattggtggcacgtctagtgatgaaatgtgcaacttatacattatgtattacatggaagccaagcatgcagtttctttcatgacctgtacccagaatgtagctccagatatgttcagaaccataccaccagaggccaacattccaattcccgtgaagtctgatatggttatgatgcatgaacatcataaagaaacagaatataaagataagattcctttactacagcagccaaaacgagaagaagaagaagtgttagaccaggatttccacatggaagaggcactggattggcctggagtatacttgttaccaggccaggtttctggggtggctctagaccctaagaataacctggtgattttccacagaggtgaccatgtctgggatggaaactcgtttgacagcaagtttgtttaccagcaaataggactcggaccaattgaagaagacactattcttgtcatagatccaaataatgctgcagtactccagtccagtggaaaaaatctgttttacttgccacatggcttgagtatagataaagatgggaattattgggtcacagacgtggctctccatcaggtgttcaaactggatccaaacaataaagaaggccctgtattaatcctgggaaggagcatgcaaccaggcagtgaccagaatcacttctgtcaacccactgatgtggctgtggatccaggcactggagccatttatgtatcagatggttactgcaacagcaggattgtgcagttttcaccaagtggaaagttcatcacacagtggggagaagagtcttcagggagcagtcctctgccaggccagttcactgttcctcacagcttggctcttgtgcctcttttgggccaattatgtgtggcagaccgggaaaatggtcggatccagtgttttaaaactgacaccaaagaatttgtgagagagattaagcattcatcatttggaagaaatgtatttgcaatttcatatataccaggcttgctctttgcagtgaatgggaagcctcattttggggaccaagaacctgtacaaggatttgtgatgaacttttccaatggggaaattatcgacatcttcaagccagtgcgcaagcactttgatatgcctcatgatattgttgcatctgaagatgggactgtgtacattggagatgctcataccaacaccgtgtggaagttcaccttgactgagaaattggaacatcgatcagttaaaaaggctggcattgaggtccaggaaatcaaagaagccgaggcagttgttgaaaccaaaatggagaacaaacccacctcctcagaattgcagaagatgcaagagaaacagaaactgatcaaagagccaggctcgggagtgcctgttgttctcattacaacccttctggttattccggtggttgtcctgctggccattgccatatttattcggtggaaaaaatcaagggcctttggagattctgaacacaaactcgagacgagttcaggaagagtactgggaagatttagaggaaagggaagtggaggcttaaaccttggtaatttctttgcaagccgtaagggctacagtcgaaaagggtttgaccggcttagcactgagggcagtgaccaagagaaagaggatgatggaagtgaatcagaagaggagtattcagcacctctgcctgcgctcgcaccttcctcctcctgaaaaccaagctttgatttagattgagtaagatttacccagaatgtcagattcctttccctttagcacgtttaaagttctgtgtatttaattgtaaactgtactagtctgtgtgggactgtacacactttatttacttcgttttggttaagttggcttctgtttctagttgaggagtttcctaaaagttcataacagtgccattgtctttatatgaacatagactagagaaaccgtcctctttttccatcataattctaatctaacaatggaagatttgcccatttacacttttgagactttttggtggatgtaaataaccccattctttgcttgaacacagtattttcccaatagcactttcattgccagtgtctttctttggtgcctttcctgttcagcattcttagcctgtggcagtaaagagaaactttgtgctacatgacgacaaagctgctaaatctcctatttttttaaaatcactaacattatattgcaatgaaggaaataaaaaagtctctatttaaattcttttttaaattttcttcagttggtgtgtttttgggatgtcttatttttagatggttacactgttagaacactattttcagaatctgaatgtaatttgtgtaataaagtgttttcagagcaaaaaaaaaaaaaaa

SEQ ID NO: 6054 - protein, 866 aa, Homo sapien
MAGRVPSLLVLLVFPSSCLAFRSPLSVFKRFKETTRPFSNECLGTTRPVVPIDSSDFALDIRMPGVTPKQSDTYFCMSMRIPVDEEAFVIDFKPRASMDTVHHMLLFGCNMPSSTGSYWFCDEGTCTDKANILYAWARNAPPTRLPKGVGFRVGGETGSKYFVLQVHYGDISAFRDNNKDCSGVSLHLTRLPQPLIAGMYLMMSVDTVIPAGEKVVNSDISCHYKNYPMHVFAYRVHTHHLGKVVSGYRVRNGQWTLIGRQSPQLPQAFYPVGHPVDVSFGDLLAARCVFTGEGRTEATHIGGTSSDEMCNLYIMYYMEAKHAVSFMTCTQNVAPDMFRTIPPEANIPIPVKSDMVMMHEHHKETEYKDKIPLLQQPKREEEEVLDQDFHMEEALDWPGVYLLPGQVSGVALDPKNNLVIFHRGDHVWDGNSFDSKFVYQQIGLGPIEEDTILVIDPNNAAVLQSSGKNLFYLPHGLSIDKDGNYWVTDVALHQVFKLDPNNKEGPVLILGRSMQPGSDQNHFCQPTDVAVDPGTGAIYVSDGYCNSRIVQFSPSGKFITQWGEESSGSSPLPGQFTVPHSLALVPLLGQLCVADRENGRIQCFKTDTKEFVREIKHSSFGRNVFAISYIPGLLFAVNGKPHFGDQEPVQGFVMNFSNGEIIDIFKPVRKHFDMPHDIVASEDGTVYIGDAHTNTVWKFTLTEKLEHRSVKKAGIEVQEIKEAEAVVETKMENKPTSSELQKMQEKQKLIKEPGSGVPVVLITTLLVIPVVVLLAIAIFIRWKKSRAFGDSEHKLETSSGRVLGRFRGKGSGGLNLGNFFASRKGYSRKGFDRLSTEGSDQEKEDDGSESEEEYSAPLPALAPSSS

SEQ ID NO: 6055 - DNA, 2372 bp, Homo sapien; identical to SEQ ID NO: 1790

SEQ ID NO: 6056 - protein, 358 aa, Homo sapien; identical to SEQ ID NO: 1791

SEQ ID NO: 6057 - DNA, 1958 bp, Homo sapien
cggcacagcctcacacctgaacgctgtcctcccgcagacgagaccggcgggcactgcaaagctgggactcgtctttgaaggaaaaaaaatagcgagtaagaaatccagcaccattcttcactgacccatcccgctgcacctcttgtttcccaagtttttgaaagctggcaactctgacctcggtgtccaaaaatcgacagccactgagaccggctttgagaagccgaagatttggcagtttccagactgagcaggacaaggtgaaagcaggttggaggcgggtccaggacatctgagggctgaccctgggggctcgtgaggctgccaccgctgctgccgctacagacccagccttgcactccaaggctgcgcaccgccagccactatcatgtccactcccggggtcaattcgtccgcctccttgagccccgaccggctgaacagcccagtgaccatcccggcggtgatgttcatcttcggggtggtgggcaacctggtggccatcgtggtgctgtgcaagtcgcgcaaggagcagaaggagacgaccttctacacgctggtatgtgggctggctgtcaccgacctgttgggcactttgttggtgagcccggtgaccatcgccacgtacatgaagggccaatggcccgggggccagccgctgtgcgagtacagcaccttcattctgctcttcttcagcctgtccggcctcagcatcatctgcgccatgagtgtcgagcgctacctggccatcaaccatgcctatttctacagccactacgtggacaagcgattggcgggcctcacgctctttgcagtctatgcgtccaacgtgctcttttgcgcgctgcccaacatgggtctcggtagctcgcggctgcagtacccagacacctggtgcttcatcgactggaccaccaacgtgacggcgcacgccgcctactcctacatgtacgcgggcttcagctccttcctcattctcgccaccgtcctctgcaacgtgcttgtgtgcggcgcgctgctccgcatgcaccgccagttcatgcgccgcacctcgctgggcaccgagcagcaccacgcggccgcggccgcctcggttgcctcccggggccaccccgctgcctccccagccttgccgcgcctcagcgactttcggcgccgccggagcttccgccgcatcgcgggcgccgagatccagatggtcatcttactcattgccacctccctggtggtgctcatctgctccatcccgctcgtggtgcgagtattcgtcaaccagttatatcagccaagtttggagcgagaagtcagtaaaaatccagatttgcaggccatccgaattgcttctgtgaaccccatcctagacccctggatatatatcctcctgagaaagacagtgctcagtaaagcaatagagaagatcaaatgcctcttctgccgcattggcgggtcccgcagggagcgctccggacagcactgctcagacagtcaaaggacatcttctgccatgtcaggccactctcgctccttcatctcccgggagctgaaggagatcagcagtacatctcagaccctcctgccagacctctcactgccagacctcagtgaaaatggccttggaggcaggaatttgcttccaggtgtgcctggcatgggcctggcccaggaagacaccacctcactgaggactttgcgaatatcagagacctcagactcttcacagggtcaggactcagagagtgtcttactggtggatgaggctggtgggagcggcagggctgggcctgcccctaaggggagctccctgcaagtcacatttcccagtgaaacactgaacttatcagaaaaatgtatataataggcaaggaaagaaatacagtactgtttctggacccttataaaatcctgtgcaatagacacatacatgtcacatttagctgtgctcagaagggctatcatca

SEQ ID NO: 6058 - protein, 488 aa, Homo sapien
MSTPGVNSSASLSPDRLNSPVTIPAVMFIFGVVGNLVAIVVLCKSRKEQKETTFYTLVCGLAVTDLLGTLLVSPVTIATYMKGQWPGGQPLCEYSTFILLFFSLSGLSIICAMSVERYLAINHAYFYSHYVDKRLAGLTLFAVYASNVLFCALPNMGLGSSRLQYPDTWCFIDWTTNVTAHAAYSYMYAGFSSFLILATVLCNVLVCGALLRMHRQFMRRTSLGTEQHHAAAAASVASRGHPAASPALPRLSDFRRRRSFRRIAGAEIQMVILLIATSLVVLICSIPLVVRVFVNQLYQPSLEREVSKNPDLQAIRIASVNPILDPWIYILLRKTVLSKAIEKIKCLFCRIGGSRRERSGQHCSDSQRTSSAMSGHSRSFISRELKEISSTSQTLLPDLSLPDLSENGLGGRNLLPGVPGMGLAQEDTTSLRTLRISETSDSSQGQDSESVLLVDEAGGSGRAGPAPKGSSLQVTFPSETLNLSEKCI

SEQ ID NO: 6059 - DNA, 1543 bp, Homo sapien; identical to SEQ ID NO: 1634

SEQ ID NO: 6060 - protein, 433 aa, Homo sapien; identical to SEQ ID NO: 1635

SEQ ID NO: 6061 - DNA, 6196 bp, Homo sapien; identical to SEQ ID NO: 1170

SEQ ID NO: 6062 - protein, 1080 aa, Homo sapien; identical to SEQ ID NO: 1171

SEQ ID NO: 6063 - DNA, 2916 bp, Homo sapien
  Unsure 15: Unknown base
  Unsure 21-22: Unknown base
  Unsure 96: Unknown base
  Unsure 169: Unknown base
  Unsure 238: Unknown base
  Unsure 2730: Unknown base
  Unsure 2736: Unknown base
  Unsure 2743: Unknown base
  Unsure 2862: Unknown base
  Unsure 2883: Unknown base
agcagagctttcccnccatgnnagaagcttcatgagtcacacattacatctttgggttgattgaatgccactgaaacatttctagtagcctggagnagttgacctacctgtggagatgcctgccattaaatggcatcctgatggcttaatacacatcactcttctgtgnagggttttaattttcaacacagcttactctgtagcatcatgtttacattgtatgtataaagattatacnaaggtgcaattgtgtatttcttccttaaaatgtatcagtataggatttagaatctccatgttgaaactctaaatgcatagaaataaaaataataaaaaatttttcattttgccttttcagcctagtattaaaactgataaaagcaaagccatgcacaaaactacctccctagagaaaggctagtcccttttcttccccattcatttcattatgaacatagtagaaaacagcatattcttatcaaatttgatgaaaagcgccaacacgtttgaactgaaatacgacttgtcatgtgaactgtaccgaatgtctacgtattccacttttcctgctggggttcctgtctcagaaaggagtcttgctcgtgctggtttctattacactggtgtgaatgacaaggtcaaatgcttctgttgtggcctgatgctggataactggaaaagaggagacagtcctactgaaaagcataaaaagttgtatcctagctgcagattcgttcagagtctaaattccgttaacaacttggaagctacctctcagcctacttttccttcttcagtaacacattccacacactcattacttccgggtacagaaaacagtggatatttccgtggctcttattcaaactctccatcaaatcctgtaaactccagagcaaatcaagaattttctgccttgatgagaagttcctacccctgtccaatgaataacgaaaatgccagattacttacttttcagacatggccattgacttttctgtcgccaacagatctggcacgagcaggcttttactacataggacctggagacagagtggcttgctttgcctgtggtggaaaattgagcaattgggaaccgaaggataatgctatgtcagaacacctgagacattttcccaaatgcccatttatagaaaatcagcttcaagacacttcaagatacacagtttctaatctgagcatgcagacacatgcagcccgctttaaaacattctttaactggccctctagtgttctagttaatcctgagcagcttgcaagtgcgggtttttattatgtgggtaacagtgatgatgtcaaatgcttttgctgtgatggtggactcaggtgttgggaatctggagatgatccatgggttcaacatgccaagtggtttccaaggtgtgagtacttgataagaattaaaggacaggagttcatccgtcaagttcaagccagttaccctcatctacttgaacagctgctatccacatcagacagcccaggagatgaaaatgcagagtcatcaattatccatttggaacctggagaagaccattcagaagatgcaatcatgatgaatactcctgtgattaatgctgccgtggaaatgggctttagtagaagcctggtaaaacagacagttcagagaaaaatcctagcaactggagagaattatagactagtcaatgatcttgtgttagacttactcaatgcagaagatgaaataagggaagaggagagagaaagagcaactgaggaaaaagaatcaaatgatttattattaatccggaagaatagaatggcactttttcaacatttgacttgtgtaattccaatcctggatagtctactaactgccggaattattaatgaacaagaacatgatgttattaaacagaagacacagacgtctttacaagcaagagaactgattgatacgattttagtaaaaggaaatattgcagccactgtattcagaaactctctgcaagaagctgaagctgtgttatatgagcatttatttgtgcaacaggacataaaatatattcccacagaagatgtttcagatctaccagtggaagaacaattgcggagactaccagaagaaagaacatgtaaagtgtgtatggacaaagaagtgtccatagtgtttattccttgtggtcatctagtagtatgcaaagattgtgctccttctttaagaaagtgtcctatttgtaggagtacaatcaagggtacagttcgtacatttctttcatgaagaagaaccaaaacatcgtctaaactttagaattaatttattaaatgtattataactttaacttttatcctaatttggtttccttaaaatttttatttatttacaactcaaaaaacattgttttgtgtaacatatttatatatgtatctaaaccatatgaacatatattttttagaaactaagagaatgataggcttttgttcttatgaacgaaaaagaggtagcactacaaacacaatattcaatccaaatttcagcattattgaaattgtaagtgaagtaaaacttaagatatttgagttaacctttaagaattttaaatattttggcattgtactaataccgggaacatgaagccaggtgtggtggtatgtacctgtagtcccaggctgaggcaagagaattacttgagcccaggagtttgaatccatcctgggcagcatactgagaccctgcctttaaaaacnaacagnaccaaanccaaacaccagggacacatttctctgtcttttttgatcagtgtcctatacatcgaaggtgtgcatatatgttgaatcacattttagggacatggtgtttttataaagaattctgtgagnaaaaatttaataaagcaaccnaaattactcttaaaaaaaaaaaaaaaaaaaaaa

SEQ ID NO: 6064 - protein, 604 aa, Homo sapien [sequence omitted]

SEQ ID NO: 6065 - DNA, 1011 bp, Homo sapien
atgacctccagaggtttccagcgaagctgtaacaatccaccctgcagctctatgacagggaggagggcgaatcaaatccatcatcttacgccagacttcagcctgcgggagctgctgcctccaaagaaagcggggacctgggcggactgcgtctctcccccgtgtggagaacgtgacagatgtgaaggttgggctgacagacacacggcctgcagcagcccagccagcacctgccaagtccacactcaggactgtgacagcctcaacaacatgaggtccagacacattcactgtggaaggctctgccacgcgaacaaagctgtcagctctagcaaaagggacactgccttcttcctccctcacttctcacctggtaagcccgggaatcaaaacagcaaaaatgagcccccaaaaaagagagagagagagagaagcagccactgttacccagcagcacccgctgcacaggcagaagcacctctggtgccactttcaagacaaaacaagagcacagttgaaacatctaatttgaaaatgttgatctcctttcctaagacattgctaaggggcccacaggaaggctggtggcaccagggaataaaccctggaagtggtgcagccactctgggaccaggcagctccgagaggcctcaatccatcgaggccagctgctcgatggcacggcgcactttcttcgcagtttcctcaaattctttcttcttattgttggtttcctttgcaattttgttcttggctctttctctgtccagtttcaaaaattcaccaagggttaattcttcaaactgcttcttgacagaaaggaaagcgcaaccggacgaatgctttttatgttcctctatggggtcgtcatctggctcccagccttccagctccttgaagcagaagaaacactgggccaagtctggctcgttctcagtggggcagtggatgaagccagcctcggccatccgctccggggtgcagcgcagccctccaagaagggccagttct

SEQ ID NO: 6066 - protein, 337 aa, Homo sapien [sequence omitted]

SEQ ID NO: 6067 - DNA, 3702 bp, Homo sapien; identical to SEQ ID NO: 1178

SEQ ID NO: 6068 - protein, 1050 aa, Homo sapien; identical to SEQ ID NO: 1179

SEQ ID NO: 6069 - DNA, 1682 bp, Homo sapien; identical to SEQ ID NO: 1083

SEQ ID NO: 6070 - protein, 432 aa, Homo sapien; identical to SEQ ID NO: 1084

SEQ ID NO: 6071 - DNA, 2377 bp, Homo sapien
gtcttgtgtggttgcagcaaggcaaagagtgtggggcgtctctgtgttccagggccagtgctcttctgggtgatcctggtgttggttgtggtggtcggctccagcgccttcctcctgtgccaccggagggcctgcaggaagcgaattcggcagaagctccacctgtgctacccggtccagacctcccagcccaagctagagcttgtggattccagacccaggaggagctcaacgcagctgaggagcggtgcgtcggtgacagaacccgtcgcggaagagcgagggttaatgagccagccactgatggagacctgccacagcgtgggcgcagcctacctggagagcctgccgctgcaggatgccagcccggccgggggcccctcgtcccccagggaccttcctgagccccgggtgtccacggagcacaccaataacaagattgagaaaatctacatcatgaaggctgacaccgtgatcgtggggaccgtgaaggctgagctgccggagggccggggcctggcggggccagcagagcccgagttggaggaggagctggaggcggaccataccccccactaccccgagcaggagacagaaccgcctctgggcagctgcagcgatgtcatgctctcagtggaagaggaagggaaagaagaccccttgcccacagctgcctctggaaagtgaggcctgggctgggctggggctaggagggcagcagggtggcctctgggaggccaggatggcactgttggcaccgaggttgggggcagaggcccatctggcctgaactgaggctccagcatctagtggtggaccggccggtcactgcaggggtctggtggtctctgcttgcatccccaacttagctgtcccctgacccagagcctaggggatccggggcttgtacagaagagacagtccaaggggactggatcccagcagtgatgttggttgaggcagcaaacagatggcaggatgggcactgccgagaacagcattggtcccagagccctgggcatcagaccttaaccaccaggcccacagcccagcgagggagaggtcgtgaggccagctcccggggcccctgtaaccctactctcctctctccctggacctcagaggtgacacccattgggcccttccggcatgcccccagttactgtaaatgtggcccccagtgggcatggagccagtgcctgtggttgtttctccagagtcaaaagggaagtcgagggatggggcgtcgtcagctggcactgtctctgctgcagcggccacactgtactctgcactggtgtgagggcccctgcctggactgtgggaccctcctggtgctgcccaccttccctgtcctgtagccccctcggtgggcccagggcctaggggcccaggatcaagtcactcatctcagaatgtccccaccaatccccgccacagcaggcgcctcgggtcccagatgtctgcagccctcagcagctgcagaccgcccctcaccaacccagagaacctgctttactttgcccagggacttcctccccatgtgaacatggggaacttcgggccctgcctggagtccttgaccgctctctgtgggccccacccactctgtcctgggaaatgaagaagcatcttccttaggtctgccctgcttgcaaatccactagcaccgaccccaccacctggttccggctctgcacgctttggggtgtggatgtcgagaggcaccacggcctcacccaggcatctgctttactctggaccataggaaacaagaccgtttggaggtttcatcaggattttgggtttttcacatttcacgctaaggagtagtggccctgacttccggtcggctggccagctgactccctagggccttcagacgtgtatgcaaatgagtgatggataaggatgagtcttggagttgcgggcagcctggagactcgtggacttaccgcctggaggcaggcccgggaaggctgctgtttactcatcgggcagccacgtgctctctggaggaagtgatagtttctgaaaccgctcagatgttttggggaaagttggagaagccgtggccttgcgagaggtggttacaccagaacctggacattggccagaagaagcttaagtgggcagacactgtttgcccagtgtttgtgcaaggatggagtgggtgtctctgcatcacccacagccgcagctgtaaggcacgctggaaggcacacgcctgccaggcagggcagtctggcgcccatgatgggagggattgacatgtttcaacaaaataatgcacttccttacctagtggcccttcacacaacttttgaatctctaaaaatccataaaatccttaaagaactgtaaaaaaaaaaaaaaa

SEQ ID NO: 6072 - protein, 132 aa, Homo sapien
MSQPLMETCHSVGAAYLESLPLQDASPAGGPSSPRDLPEPRVSTEHTNNKIEKIYIMKADTVIVGTVKAELPEGRGLAGPAEPELEEELEADHTPHYPEQETEPPLGSCSDVMLSVEEEGKEDPLPTAASGK

SEQ ID NO: 6073 - DNA, 2042 bp, Homo sapien; identical to SEQ ID NO: 1602

SEQ ID NO: 6074 - protein, 476 aa, Homo sapien; identical to SEQ ID NO: 1603

SEQ ID NO: 6075 - DNA, 2156 bp, Homo sapien; identical to SEQ ID NO: 1546

SEQ ID NO: 6076 - protein, 355 aa, Homo sapien; identical to SEQ ID NO: 1547

SEQ ID NO: 6077 - DNA, 1292 bp, Homo sapien; identical to SEQ ID NO: 3057

SEQ ID NO: 6078 - protein, 376 aa, Homo sapien
MALTAHPSCLLALLVAGLAQGIRGPLRAQDLGPQPLELKEAFKLFQIQFNRSYLSPEEHAHRLDIFAHNLAQAQRLQEEDLGTAEFGVTPFSDLTEEEFGQLYGYRRAAGGVPSMGREIRSEEPEESVPFSCDWRKVAGAISPIKDQKNCNCCWAMAAAGNIETLWRISFWDFVDVSVQELLDCGRCGDGCHGGFVWDAFITVLNNSGLASEKDYPFQGKVRAHRCHPKKYQKVAWIQDFIMLQNNEHRIAQYLATYGPITVTINMKPLQLYRKGVIKATPTTCDPQLVDHSVLLVGFGSVKSEEGIWAETVSSQSQPQPPHPTPYWILKNSWGAQWGEKGYFRLHRGSNTCGITKFPLTARVQKPDMKPRVSCPP

SEQ ID NO: 6079 - DNA, 2757 bp, Homo sapien
tctaaaggtcgggggcagcagcaagatgcgaagcgagccgtacagatcccgggctctccgaacgcaacttcgccctgcttgagcgaggctgcggtttccgaggccctctccagccaaggaaaagctacacaaaaagcctggatcactcatcgaaccacccctgaagccagtgaaggctctctcgcctcgccctctagcgttcgtctggagtagcgccaccccggcttcctggggacacagggttggcaccatggggcccaccagcgtcccgctggtcaaggcccaccgcagctcggtctctgactacgtcaactatgatatcatcgtccggcattacaactacacgggaaagctgaatatcagcgcggacaaggagaacagcattaaactgacctcggtggtgttcattctcatctgctgctttatcatcctggagaacatctttgtcttgctgaccatttggaaaaccaagaaattccaccgacccatgtactattttattggcaatctggccctctcagacctgttggcaggagtagcctacacagctaacctgctcttgtctggggccaccacctacaagctcactcccgcccagtggtttctgcgggaagggagtatgtttgtggccctgtcagcctccgtgttcagtctcctcgccatcgccattgagcgctatatcacaatgctgaaaatgaaactccacaacgggagcaataacttccgcctcttcctgctaatcagcgcctgctgggtcatctccctcatcctgggtggcctgcctatcatgggctggaactgcatcagtgcgctgtccagctgctccaccgtgctgccgctctaccacaagcactatatcctcttctgcaccacggtcttcactctgcttctgctctccatcgtcattctgtactgcagaatctactccttggtcaggactcggagccgccgcctgacgttccgcaagaacatttccaaggccagccgcagctctgagaatgtggcgctgctcaagaccgtaattatcgtcctgagcgtcttcatcgcctgctgggcaccgctcttcatcctgctcctgctggatgtgggctgcaaggtgaagacctgtgacatcctcttcagagcggagtacttcctggtgttagctgtgctcaactccggcaccaaccccatcatttacactctgaccaacaaggagatgcgtcgggccttcatccggatcatgtcctgctgcaagtgcccgagcggagactctgctggcaaattcaagcgacccatcatcgccggcatggaattcagccgcagcaaatcggacaattcctcccacccccagaaagacgaaggggacaacccagagaccattatgtcttctggaaacgtcaactcttcttcctagaactggaagctgtccacccaccggaagcgctctttacttggtcgctggccaccccagtgtttggaaaaaaatctctgggcttcgactgctgccagggaggagctgctgcaagccagagggaggaagggggagaatacgaacagcctggtggtgtcgggtgttggtgggtagagttagttcctgtgaacaatgcactgggaagggtggagatcaggtcccggcctggaatatatattctacccccctggagctttgattttgcactgagccaaaggtctagcattgtcaagctcctaaagggttcatttggcccctcctcaaagactaatgtccccatgtgaaagcgtctctttgtctggagctttgaggagatgttttccttcactttagtttcaaacccaagtgagtgtgtgcacttctgcttctttagggatgccctgtacatcccacaccccaccctcccttcccttcatacccctcctcaacgttcttttactttatactttaactacctgagagttatcagagctggggttgtggaatgatcgatcatctatagcaaataggctatgttgagtacgtaggctgtgggaagatgaagatggtttggaggtgtaaaacaatgtccttcgctgaggccaaagtttccatgtaagcgggatccgttttttggaatttggttgaagtcactttgatttctttaaaaaacatcttttcaatgaaatgtgttaccatttcatatccattgaagccgaaatctgcataaggaagcccactttatctaaatgatattagccaggatccttggtgtcctaggagaaacagacaagcaaaacaaagtgaaaaccgaatggattaacttttgcaaaccaagggagatttcttagcaaatgagtctaacaaatatgacatccgtctttcccacttttgttgatgtttatttcagaatcttgtgtgattcatttcaagcaacaacatgttgtattttgttgtgttaaaagtacttttcttgatttttgaatgtatttgtttcaggaagaagtcattttatggatttttctaacccgtgttaacttttctagaatccaccctcttgtgcccttaagcattactttaactggtagggaacgccagaacttttaagtccagctattcattagatagtaattgaagatatgtataaatattacaaagaataaaaatatattactgtctctttagtatggttttcagtgcaattaaaccgagagatgtcttgtttttttaaaaagaatagtatttaataggtttctgacttttgtggatcattttgcacatagctttatcaacttttaaacattaataaactgatttttttaaag

SEQ ID NO: 6080 - protein, 381 aa, Homo sapien
MGPTSVPLVKAHRSSVSDYVNYDIIVRHYNYTGKLNISADKENSIKLTSVVFILICCFIILENIFVLLTIWKTKKFHRPMYYFIGNLALSDLLAGVAYTANLLLSGATTYKLTPAQWFLREGSMFVALSASVFSLLAIAIERYITMLKMKLHNGSNNFRLFLLISACWVISLILGGLPIMGWNCISALSSCSTVLPLYHKHYILFCTTVFTLLLLSIVILYCRIYSLVRTRSRRLTFRKNISKASRSSENVALLKTVIIVLSVFIACWAPLFILLLLDVGCKVKTCDILFRAEYFLVLAVLNSGTNPIIYTLTNKEMRRAFIRIMSCCKCPSGDSAGKFKRPIIAGMEFSRSKSDNSSHPQKDEGDNPETIMSSGNVNSSS

SEQ ID NO: 6081 - DNA, 2770 bp, Homo sapien
aaacacggtgaaaagaaaccgcccattacacaccccagtacaccagcagaggaaacttataacctcgggaggcaggtccttcccctcagtgcggtcacatacttccagaagagcggaccagggctgctgccagcacctgccactcagagcgcctctgtcgctgggacccttcagaactctctttgctcacaagttaccaaaaaaaaaagagccaacatgttggtattgctggctggtatctttgtggtccacatcgctactgttattatgctatttgttagcaccattgccaatgtctggttggtttccaatacggtagatgcatcagtaggtctttggaaaaactgtaccaacattagctgcagtgacagcctgtcatatgccagtgaagatgccctcaagacagtgcaggccttcatgattctctctatcatcttctgtgtcattgccctcctggtcttcgtgttccagctcttcaccatggagaagggaaaccggttcttcctctcaggggccaccacactggtgtgctggctgtgcattcttgtgggggtgtccatctacactagtcattatgcgaatcgtgatggaacgcagtatcaccacggctattcctacatcctgggctggatctgcttctgcttcagcttcatcatcggcgttctctatctggtcctgagaaagaaataaggccggacgagttcatggggatctggggggtggggaggaggaagccgttgaatctgggagggaagtggaggttgctgtacaggaaaaaccgagataggggaggggggagggggaagcaaaggggggaggtcaaatcccaaaccattactgaggggattctctactgccaagcccctgccctggggagaaagtagttggctagtactttgatgctcccttgatggggtccagagagcctccctgcagccaccagacttggcctccagctgttcttagtgacacacactgtctggggccccatcagctgccacaacaccagccccacttctgggtcatgcactgaggtccacagacctactgcactgagttaaaatagcggtacaagttctggcaagagcagatactgtctttgtgctgaatacgctaagcctggaagccatcctgcccttctgacccaaagcaaaacatcacattccagtctgaagtgcctactggggggctttggcctgtgagccattgtccctctttggaacagatatttagctctgtggaattcagtgacaaaatgggaggaggaaagagagtttgtaaggtcatgctggtgggttagctaaaccaagaaggagaccttttcacaatggaaaacctgggggatggtcagagcccagtcgagacctcacacacggctgtccctcatggagacctcatgccatggtctttgctaggcctcttgctgaaagccaaggcagctcttctggagtttctctaaagtcactagtgaacaattcggtggtaaaagtaccacacaaactatgggatccaaggggcagtcttgcaacagtgccatgttagggttatgtttttaggattcccctcaatgcagtcagtgtttcttttaagtatacaacaggagagagatggacatggctcattgtagcacaatcctattactcttcctctaacatttttgaggaagttttgtctaattatcaatattgaggatcagggctcctaggctcagtggtagctctggcttagacaccacctggagtgatcacctcttggggaccctgcctatcccacttcacaggtgaggcatggcaattctggaagctgattaaaacacacataaaccaaaaccaaacaacaggcccttgggtgaaaggtgctatataattgtgaagtattaagcctaccgtatttcagccatgataagaacagagtgcctgcattcccaggaaaatacgaaaatcccatgagataaataaaaatataggtgatgggcagatcttttctttaaaataaaaaagcaaaaactcttgtggtacctagtcagatggtagacgagctgtctgctgccgcaggagcacctctatacaggacttagaagtagtatgttattcctggttaagcaggcattgctttgccctggagcagctattttaagccatctcagattctgtctaaaggggttttttgggaagacgttttctttatcgccctgagaagatctaccccagggagaatctgagacatcttgcctacttttctttattagctttctcctcatccatttcttttatacctttcctttttggggagttgttatgccatgatttttggtatttatgtaaaaggattattactaattctatttctctatgtttattctagttaaggaaatgttgagggcaagccaccaaattacctaggctgaggttagagagattggccagcaaaaactgtgggaagatgaactttgtcattatgatttcattatcacatgattatagaaggctgtcttagtgcaaaaaacatacttacatttcagacatatccaaagggaatactcacattttgttaagaagttgaactatgactggagtaaaccatgtattcccttatcttttactttttttctgtgacatttatgtctcatgtaatttgcattactctggtggattgttctagtactgtattgggcttcttcgttaatagattatttcatatactataattgtaaatattttgatacaaatgtttataactctagggatataaaaacagattctgattccca

SEQ ID NO: 6082 - protein, 157 aa, Homo sapien; identical to SEQ ID NO: 402

SEQ ID NO: 6083 - DNA, 8368 bp, Homo sapien; identical to SEQ ID NO: 223

SEQ ID NO: 6084 - protein, 2647 aa, Homo sapien; identical to SEQ ID NO: 2970

SEQ ID NO: 6085 - DNA, 9473 bp, Homo sapien
ggcggccaggggcgggcggccgcagagcagcaccggccgtggctccggtagcagcaagttcgaaccccgctcccgctccgcttcggttctcgctccttcgcccttgggcctccaaacaccagtccccggcagctcgttgcgcattgcgctctccccgccaccaggatgccggtaaccgagaaggatctagctgaggacgcgccttggaagaagatccagcagaacacgttcacacgctggtgcaacgagcacctcaagtgcgtgaacaaacgcatcggcaacctgcagaccgacctgagcgacgggctgcggctcatcgcgctgctcgaggtgctcagccagaagcgcatgtaccgcaagtaccatcagcggcccacctttcgccagatgcagctcgagaatgtgtccgtggcgctcgagttcctggaccgtgagagcatcaagctcgtgtccatcgatagcaaagccattgtggatgggaacctgaagctcatcttgggtctggtgtggacgctgatcctccactactccatctccatgcccgtgtgggaggatgaaggggatgatgatgccaagaagcagacgccaaagcagaggctgctggggtggattcagaacaagatcccctacttgcccatcaccaactttaaccagaactggcaagacggcaaagccctgggagccctggtagacagctgtgctccaggtctgtgcccagactgggaatcctgggacccgcagaagcctgtggataatgcacgagaagccatgcagcaggcagatgactggctgggtgtcccacaggtcatcactcctgaagaaatcattcacccggatgtggacgagcactcagttatgacttacctgtcccagttccccaaagccaagctcaagccgggggctcctctcaaacccaaactcaacccgaagaaagccagggcctatggcagaggaatcgagcccactggaaacatggtgaagcagccagccaagttcactgtggacaccatcagcgccgggcaaggagacgtgatggtgtttgttgaggacccagaagggaacaaagaggaggcacaagtgacccctgacagtgacaagaacaagacatactctgtggagtatctgcccaaggtcaccgggctacacaaagtcacagtcctctttgcaggacagcacatctccaagagcccatttgaagtgagtgttgacaaggcccagggagatgccagtaaagtcactgcaaaaggtccagggttggaagctgtagggaacatcgccaataagcccacctactttgacatctatacggcaggagctggtgtgggtgacattggtgtggaggtggaagatccccaggggaagaacaccgtggagttgctcgtggaagacaaaggaaaccaggtgtatcgatgtgtgtacaaacccatgcagcctggccctcacgtggtcaagatcttctttgctggggacactattcctaagagtcccttcgttgtgcaggttggggaagcctgcaatccaaatgcctgccgggccagtggccgaggcctacaacccaaaggcgtccgtatccgggagaccacagatttcaaggttgacaccaaagctgcaggaagtggggagctcggtgtaaccatgaagggtcctaagggtctggaggagctggtgaagcagaaagactttctggatggggtctacgcattcgagtattaccccagcaccccggggagatacagcattgccatcacatgggggggacaccacattccaaagagcccctttgaagttcaagttggccctgaagcgggtatgcagaaagtccgtgcttggggccctgggctccatggtgggattgtcgggcggtcagcggacttcgtggtagaatccattggctctgaagtggggtctctggggtttgccattgaaggcccctctcaggcaaagattgagtacaacgaccagaatgatggatcgtgtgatgtcaaatactggcccaaggagcctggcgaatatgctgttcacatcatgtgtgacgacgaagacatcaaggacagcccgtacatggccttcatccacccagccacgggaggctacaaccctgatctggttcgagcatacgggccaggtttggagaaatctggatgcattgtcaacaacctggccgagttcactgtggatcctaaggatgctggaaaagctcccttaaagatatttgctcaggatggggaaggccaacgcattgacatccagatgaagaaccggatggacggcacatatgcatgctcatacaccccggtgaaggccatcaagcacaccattgctgtggtctggggaggcgtgaacatcccgcacagcccctacagggtcaacatcgggcaaggtagccatcctcagaaggtcaaagtgtttgggccaggtgtggagagaagtggtctgaaggcaaatgaacctacacacttcacggtggactgtactgaggctggggaaggtgatgtcagtgttggcattaagtgtgatgcccgggtgttaagtgaagatgaggaagacgtggattttgacattattcacaatgccaatgatacgttcacagtcaaatatgtgcctcctgctgctgggcgatacactatcaaagttctctttgcatctcaggaaatccccgccagccctttcagagtcaaagttgacccttcccacgatgccagcaaagtgaaggcagaaggcccagggctcagcaaagcaggtgtggaaaatgggaaaccgacccacttcactgtctacaccaagggggctgggaaagccccgctcaacgtgcagttcaacagccctcttcctggcgatgcagtgaaggatttggatatcatcgataattatgactactctcacacggttaaatatacacccacccaacagggcaacatgcaggttctggtgacttacggtggcgatcccatccctaaaagccctttcactgtgggtgttgctgcaccgctggatctgagcaagataaaactcaatgggctggaaaacagggtggaagttgggaaggatcaggagttcaccgttgataccaggggggcaggaggccaggggaagctggacgtgacaatcctcagcccctctcggaaggtcgtgccatgcctagtgacacctgtgacaggccgggagaacagcacggccaagttcatccctcgggaggaggggctgtatgctgtagacgtgacctacgatggacaccctgtgcccgggagcccctacacagtggaggcctcgctgccaccagatcccagcaaggtgaaggcccacggtcccggcctcgaaggtggtctcgtgggcaagcctgccgagttcaccatcgataccaaaggagctggtactggaggtctgggcttaacggtggaaggtccgtgcgaggccaaaatcgagtgctccgacaatggtgatgggacctgctccgtctcttaccttcccacaaaacccggggagtacttcgtcaacatcctctttgaagaagtccacatacctgggtctcccttcaaagctgacattgaaatgccctttgacccctctaaagtcgtggcatcggggccaggtctcgagcacgggaaggtgggtgaagctggcctccttagcgtcgactgctcggaagcgggaccgggggccctgggcctggaagctgtctcggactcgggaacaaaagccgaagtcagtattcagaacaacaaagatggcacctacgcggtgacctacgtgcccctgacggccggcatgtacacgttgaccatgaagtatggtggcgaactcgtgccacacttccccgcccgggtcaaggtggagcccgccgtggacaccagcaggatcaaagtctttggaccaggaatagaagggaaagatgtgttccgggaagctaccaccgactttacagttgactctcggccgctgacccaggttgggggtgaccacatcaaggcccacattgccaacccctcaggggcctccaccgagtgctttgtcacagacaatgcggatgggacctaccaggtggaatacacaccctttgagaaaggtctccatgtagtggaggtgacatatgatgacgtgcctatcccaaacagtcccttcaaggtggctgtcactgaaggctgccagccatctagggtgcaagcccaaggacctggattgaaagaggcctttaccaacaagcccaatgtcttcaccgtggttaccagaggcgcaggaattggtgggcttggcataactgttgagggaccatcagagtcgaagataaattgcagagacaacaaggatggcagctgcagtgctgagtacattcctttcgcgccgggggattacgatgttaatatcacatatggaggagcccacatccccggcagccccttcagggttcctgtgaaggatgttgtggaccccagcaaggtcaagattgccggccccgggctgggctcaggcgtccgagcccgtgtcctgcagtccttcacggtggacagcagcaaggctggcctggctccgctggaagtgagggttctgggcccacgaggcttggtggagccagtgaacgtggtggacaatggagatggcacacacacagtaacctacaccccatctcaggagggaccttacatggtctcagttaaatatgctgatgaagagattcctcgcagtcccttcaaggtcaaggtccttcccacatatgatgccagcaaagtgactgccagtggccccggccttagttcctatggtgtgcctgccagtctacctgtggactttgcaattgatgcccgagatgccggggaaggcctgcttgctgttcaaataacggaccaagaaggaaaacccaaaagagccattgtccatgacaataaagatggcacgtatgctgtcacctacatccccgacaagactgggcgctatatgattggagtcacctacgggggtgacgacatcccactttctccttatcgcatccgagccacacagacgggtgatgccagcaagtgcctggccacgggtcctggaatcgcctccactgtgaaaactggcgaagaagtaggctttgtggttgatgccaagactgccgggaagggtaaagtgacctgcacggttctgaccccagatggcactgaggccgaggccgatgtcattgagaatgaagatggaacctatgacatcttctacacagctgccaagccgggcacatatgtgatctatgtgcgcttcggtggtgttgatattcctaacagccccttcactgtcatggccacagatggggaagtcacagccgtggaggaggcaccggtaaatgcatgtccccctggattcaggccctgggtgaccgaagaggcctatgtcccagtgagtgacatgaacggcctgggatttaagccttttgacctggtcattccgtttgctgtcaggaaaggagaaatcactggagaggtccacatgccttctgggaagacagccacacctgagattgtggacaacaaggacggcacggtcactgttagatatgcccccactgaggtcgggctccatgagatgcacatcaaatacatgggcagccacatccctgagagcccactccagttctacgtgaactaccccaacagtggaagtgtttctgcatacggtccaggcctcgtgtatggagtggccaacaaaactgccaccttcaccatcgtcacagaggatgcaggagaaggtggtctggacttggctattgagggcccctcaaaagcagaaatcagctgcattgacaataaagatgggacatgcacagtgacctacctgccgactctgccaggcgactacagcattctggtcaagtacaatgacaagcacatccctggcagccccttcacagccaagatcacagatgacagcaggcggtgctcccaggtgaagttgggctcagccgctgacttcctgctcgacatcagtgagactgacctcagcagcctgacggccagcattaaggccccatctggccgagacgagccctgtctcctgaagaggctgcccaacaaccacattggcatctccttcatcccccgggaagtgggcgaacatctggtcagcatcaagaaaaatggcaaccatgtggccaacagccccgtgtctatcatggtggtccagtcggagattggtgacgcccgccgagccagagtctatggccgcggcctgtcagaaggccggactttcgagatgtctgacttcatcgtggacacaagggatgcaggttatggtggcatatccttggcggtggaaggccccagcaaagtggacatccagacggaggacctggaagatggcacctgcaaagtctcctacttccctaccgtgcctggggtttatatcgtctccaccaaattcgctgacgagcacgtgcctgggagcccatttaccgtgaagatcagtggggagggaagagtcaaagagagcatcacccgcaccagtcgggccccgtccgtggccactgtcgggagcatttgtgacctgaacctgaaaatcccagaaatcaacagcagtgatatgtcggcccacgtcaccagcccctctggccgtgtgactgaggcagagattgtgcccatggggaagaactcacactgcgtccggtttgtgccccaggagatgggcgtgcacacggtcagcgtcaagtaccgtgggcagcacgtcaccggcagccccttccagttcaccgtggggccacttggtgaaggaggcgcccacaaggtgcgggcaggaggccctggcctggagagaggagaagcgggagtcccagctgagttcagcatttggacccgggaagcaggcgctggaggcctctccatcgctgttgagggccccagtaaggccgagattacattcgatgaccataaaaatgggtcgtgcggtgtatcttatattgcccaagagcctggtaactacgaggtgtccatcaagttcaatgatgagcacatcccggaaagcccctacctggtgccggtcatcgcaccctccgacgacgcccgccgcctcactgttatgagccttcaggaatcgggattaaaagttaaccagccagcatcctttgctataaggttgaatggcgcaaaaggcaagattgatgcaaaggtgcacagcccctctggagccgtggaggagtgccacgtgtctgagctggagccagataagtatgctgttcgcttcatccctcatgagaatggtgtccacaccatcgatgtcaagttcaatgggagccacgtggttggaagccccttcaaagtgcgcgttggggagcctggacaagcggggaaccctgccctggtgtccgcctatggcacgggactcgaagggggcaccacaggtatccagtcggaattctttattaacaccacccgagcaggtccagggacattatccgtcaccatcgaaggcccatccaaggttaaaatggattgccaggaaacacctgaagggtacaaagtcatgtacacccccatggctcctggtaactacctgatcagtgtcaaatacggtgggcccaaccacatcgtgggcagtcccttcaaggccaaggtgacaggccagcgtctagttagccctggctcagccaacgagacctcatccatcctggtggagtcagtgaccaggtcgtctacagagacctgctatagcgccattcccaaggcatcctcggacgccagcaaggtgacctctaagggggcagggctctcaaaggcctttgtgggccagaagagttccttcctggtggactgcagcaaagctggctccaacatgctgctgatcggggtccatgggcccaccaccccctgcgaggaggtctccatgaagcatgtaggcaaccagcaatacaacgtcacatacgtcgtcaaggagaggggcgattatgtgctggctgtgaagtggggggaggaacacatccctggcagcccttttcatgtcacagtgccttaaaacagttttctcaaatcctggagagagttcttgtggttgcctttgttgcttgtttgtaattcattttatacaaagccctccagcctgtttgtggggctgaaaccccatccctaaaatattgctgttgtaaaatgccttcagaaataagtcctagactggactcttgagggacatattggagaatcttaagaaatgcaagcttgttcagggggctgagaagatcctgagtacactaggtgcaaaccagaactcttggtggaacagaccagccactgcagcagacagaccaggaacacaatgagactgacatttcaaaaaaacaaaactggctagcctgagctgctggttcactcttcagcatttatgaaacaaggctaggggaagatgggcagagaaaaaggggacacctagtttggttgtcatttggcaaaggagatgacttaaaaatccgcttaatctcttccagtgtccgtgttaatgtatttggctattagatcactagcactgctttaccgctcctcatcgccaacacccccatgctctgtggccttcttacacttctcagagggcagagtggcagccgggcaccctacagaaactcagagggcagagtggcagccaggcccacatgtctctcaagtacctgtcccctcgctctggtgattatttcttgcagaatcaccacacgagaccatcccggcagtcatggttttgctttagttttccaagtccgtttcagtcccttccttggtctgaagaaattctgcagtggcgagcagtttcccacttgccaaagatcccttttaaccaacactagcccttgtttttaacacacgctccagcccttcatcagcctgggcagtcttaccaaaatgtttaaagtgatctcagaggggcccatggattaacgccctcatcccaaggtccgtcccatgacataacactccacacccgccccagccaacttcatgggtcactttttctggaaaataatgatctgtacagacaggacagaatgaaactctgcgggtctttggcctgaaagttgggaatggttgggggagagaagggcagcagcttattggtggtcttttcaccattggcagaaacagtgagagctgtgtggtgcagaaatccagaaatgaggtgtagggaattttgcctgccttcctgcagacctgagctggctttggaatgaggttaaagtgtcagggacgttgcctgagcccaaatgtgtagtgtggtctgggcaggcagacctttaggttttgctgcttagtcctgaggaagtggccactcttgtggcaggtgtagtatctggggcgagtgttgggggtaaaagcccaccctacagaaagtggaacagcccggagcctgatgtgaaaggaccacgggtgttgtaagctgggacacggaagccaaactggaatcaaacgccgactgtaaattgtatcttataacttattaaataaaacatttgctccgtaaaaaaaaaaaaa

SEQ ID NO: 6086 - protein, 2602 aa, Homo sapien [sequence omitted]

SEQ ID NO: 6087 - DNA, 859 bp, Homo sapien; identical to SEQ ID NO: 1822

SEQ ID NO: 6088 - protein, 235 aa, Homo sapien; identical to SEQ ID NO: 1823

SEQ ID NO: 6089 - DNA, 2400 bp, Homo sapien; identical to SEQ ID NO: 1588

SEQ ID NO: 6090 - protein, 783 aa, Homo sapien; identical to SEQ ID NO: 1589

SEQ ID NO: 6091 - DNA, 4294 bp, Homo sapien
cgctccccgctcccgtggctgccgccgccccggggaagaagagacaggggtggggtttgggggaagcgagagaggaggggagagaccctggccaggctggagcctggattcgaggggaggagggacgggaggaggagaaaggtggaggagaagggaggggggagcggggaggagcggccgggcctggggccttgaggcccggggagagccggggagccgggcccgcgcgccgagatgttgctgctgctgctactggcgccactcttcctccgccccccgggcgcgggcggggcgcagacccccaacgccacctcagaaggttgccagatcatacacccgccctgggaagggggcatcaggtaccggggcctgactcgggaccaggtgaaggctatcaacttcctgccagtggactatgagattgagtatgtgtgccggggggagcgcgaggtggtggggcccaaggtccgcaagtgcctggccaacggctcctggacagatatggacacacccagccgctgtgtccgaatctgctccaagtcttatttgaccctggaaaatgggaaggttttcctgacgggtggggacctcccagctctggacggagcccgggtggatttccggtgtgaccccgacttccatctggtgggcagctcccggagcatctgtagtcagggccagtggagcacccccaagccccactgccaggtgaatcgaacgccacactcagaacggcgcgcagtgtacatcggggcactgtttcccatgagcgggggctggccagggggccaggcctgccagcccgcggtggagatggcgctggaggacgtgaatagccgcagggacatcctgccggactatgagctcaagctcatccaccacgacagcaagtgtgatccaggccaagccaccaagtacctatatgagctgctctacaacgaccctatcaagatcatccttatgcctggctgcagctctgtctccacgctggtggctgaggctgctaggatgtggaacctcattgtgctttcctatggctccagctcaccagccctgtcaaaccggcagcgtttccccactttcttccgaacgcacccatcagccacactccacaaccctacccgcgtgaaactctttgaaaagtggggctggaagaagattgctaccatccagcagaccactgaggtcttcacttcgactctggacgacctggaggaacgagtgaaggaggctggaattgagattactttccgccagagtttcttctcagatccagctgtgcccgtcaaaaacctgaagcgccaggatgcccgaatcatcgtgggacttttctatgagactgaagcccggaaagttttttgtgaggtgtacaaggagcgtctctttgggaagaagtacgtctggttcctcattgggtggtatgctgacaattggttcaagatctacgacccttctatcaactgcacagtggatgagatgactgaggcggtggagggccacatcacaactgagatcgtcatgctgaatcctgccaatacccgcagcatttccaacatgacatcccaggaatttgtggagaaactaaccaagcgactgaaaagacaccctgaggagacaggaggcttccaggaggcaccgctggcctatgatgccatctgggccttggcactggccctgaacaagacatctggaggaggcagccgttccggcgtgcgcctggaggacttcaactacaacaaccagaccattaccgaccaaatctaccgggcaatgaactcctcgtcctttgagggtgtctctggccatgtggtgtttgatgccagcggctctcggatggcatggacgcttatcgagcagcttcagggtggcagctacaagaagattggctactatgacagcaccaaggatgatctttcctggtccaaaacagataaatggattgttatatccagaactcacagcccaacctgacaacctgactgctgtgggctgctcactggctttagctgctgtcttccccctggggctcgatggttaccacattgggaggaaccagtttcctttcgtctgccaggcccgcctctggctcctgggcctgggctttagtctgggctacggttccatgttcaccaagatttggtgggtccacacggtcttcacaaagaaggaagaaaagaaggagtggaggaagactctggaaccctggaagctgtatgccacagtgggcctgctggtgggcatggatgtcctcactctcgccatctggcagatcgtggaccctctgcaccggaccattgagacatttgccaaggaggaacctaaggaagatattgacgtctctattctgccccagctggagcattgcagctccaggaagatgaatacatggcttggcattttctatggttacaaggggctgctgctgctgctgggaatcttccttgcttatgagaccaagagtgtgtccactgagaagatcaatgatcaccgggctgtgggcatggctatctacaatgtggcagtcctgtgcctcatcactgctcctgtcaccatgattctgtccagccagcaggatgcagcctttgcctttgcctctcttgccatagttttctcctcctatatcactcttgttgtgctctttgtgcccaagatgcgcaggctgatcacccgaggggaatggcagtcggaggcgcaggacaccatgaagacagggtcatcgaccaacaacaacgaggaggagaagtcccggctgttggagaaggagaaccgtgaactggaaaagatcattgctgagaaagaggagcgtgtctctgaactgcgccatcaactccagtctcggcagcagctccgctcccggcgccacccaccgacacccccagaaccctctgggggcctgcccaggggaccccctgagccccccgaccggcttagctgtgatgggagtcgagtgcatttgctttataagtgagggtagggtgagggaggacaggccagtagggggagggaaagggagaggggaagggcaggggactcaggaagcagggggtccccatccccagctgggaagaacatgctatccaatctcatctcttgtaaatacatgtccccctgtgagttctgggctgatttgggtctctcatacctctgggaaacagacctttttctctcttactgcttcatgtaattttgtatcacctcttcacaatttagttcgtacctggcttgaagctgctcactgctcacacgctgcctcctcagcagcctcactgcatctttctcttcccatgcaacaccctcttctagttaccacggcaacccctgcagctcctctgcctttgtgctctgttcctgtccagcaggggtctcccaacaagtgctctttccaccccaaaggggcctctccttttctccactgtcataatctctttccatcttacttgcccttctatactttctcacatgtggctccccctgaattttgcttcctttgggagctcattcttttcgccaaggctcacatgctccttgcctctgctctgtgcactcacgctcagcacacatgcatcctcccctctcctgcgtgtgcccactgaacatgctcatgtgtacacacgcttttcccgtatgctttcttcatgttcagtcacatgtgctctcgggtgccctgcattcacagctacgtgtgcccctctcatggtcatgggtctgcccttgagcgtgtttgggtaggcatgtgcaatttgtctagcatgctgagtcatgtctttcctatttgcacacgtccatgtttatccatgtactttccctgtgtaccctccatgtaccttgtgtactttcttcccttaaatcatggtattcttctgacagagccatatgtaccctaccctgcacattgttatgcacttttccccaattcatgtttggtggggccatccacaccctctccttgtcacagaatctccatttctgctcagattccccccatctccattgcattcatgtactaccctcagtctacactcacaatcatcttctcccaagactgctcccttttgttttgtgtttttttgaggggaattaaggaaaaataagtgggggcaggtttggagagctgcttccagtggatagttgatgagaatcctgaccaaaggaaggcacccttgactgttgggatagacagatggacctatggggtgggaggtggtgtccctttcacactgtggtgtctcttggggaaggatctccccgaatctcaataaaccagtgaacagtgtgactcggcaaaaaaaaaaaa

SEQ ID NO: 6092 - protein, 578 aa, Homo sapien
MLLLLLLAPLFLRPPGAGGAQTPNATSEGCQIIHPPWEGGIRYRGLTRDQVKAINFLPVDYEIEYVCRGEREVVGPKVRKCLANGSWTDMDTPSRCVRICSKSYLTLENGKVFLTGGDLPALDGARVDFRCDPDFHLVGSSRSICSQGQWSTPKPHCQVNRTPHSERRAVYIGALFPMSGGWPGGQACQPAVEMALEDVNSRRDILPDYELKLIHHDSKCDPGQATKYLYELLYNDPIKIILMPGCSSVSTLVAEAARMWNLIVLSYGSSSPALSNRQRFPTFFRTHPSATLHNPTRVKLFEKWGWKKIATIQQTTEVFTSTLDDLEERVKEAGIEITFRQSFFSDPAVPVKNLKRQDARIIVGLFYETEARKVFCEVYKERLFGKKYVWFLIGWYADNWFKIYDPSINCTVDEMTEAVEGHITTEIVMLNPANTRSISNMTSQEFVEKLTKRLKRHPEETGGFQEAPLAYDAIWALALALNKTSGGGSRSGVRLEDFNYNNQTITDQIYRAMNSSSFEGVSGHVVFDASGSRMAWTLIEQLQGGSYKKIGYYDSTKDDLSWSKTDKWIVISRTHSPT

SEQ ID NO: 6093 - DNA, 3632 bp, Homo sapien; identical to SEQ ID NO: 1492

SEQ ID NO: 6094 - protein, 578 aa, Homo sapien; identical to SEQ ID NO: 1493

SEQ ID NO: 6095 - DNA, 4040 bp, Homo sapien; identical to SEQ ID NO: 1826

SEQ ID NO: 6096 - protein, 862 aa, Homo sapien; identical to SEQ ID NO: 1827

SEQ ID NO: 6097 - DNA, 1415 bp, Homo sapien
agtggaaagttctccggcagccctgagatctcaagagtgacatttgtgagaccagctaatttgattaaaattctcttggaatcagctttgctagtatcatacctgtgccagatttcatcatgggaaacagctgttacaacatagtagccactctgttgctggtcctcaactttgagaggacaagatcattgcaggatccttgtagtaactgcccagctggtacattctgtgataataacaggaatcagatttgcagtccctgtcctccaaatagtttctccagcgcaggtggacaaaggacctgtgacatatgcaggcagtgtaaaggtgttttcaggaccaggaaggagtgttcctccaccagcaatgcagagtgtgactgcactccagggtttcactgcctgggggcaggatgcagcatgtgtgaacaggattgtaaacaaggtcaagaactgacaaaaaaaggttgtaaagactgttgctttgggacatttaacgatcagaaacgtggcatctgtcgaccctggacaaactgttctttggatggaaagtctgtgcttgtgaatgggacgaaggagagggacgtggtctgtggaccatctccagccgacctctctccgggagcatcctctgtgaccccgcctgcccctgcgagagagccaggacactctccgcagatcatctccttctttcttgcgctgacgtcgactgcgttgctcttcctgctgttcttcctcacgctccgtttctctgttgttaaacggggcagaaagaaactcctgtatatattcaaacaaccatttatgagaccagtacaaactactcaagaggaagatggctgtagctgccgatttccagaagaagaagaaggaggatgtgaactgtgaaatggaagtcaatagggctgttgggactttcttgaaaagaagcaaggaaatatgagtcatccgctatcacagctttcaaaagcaagaacaccatcctacataatacccaggattcccccaacacacgttcttttctaaatgccaatgagttggcctttaaaaatgcaccacttttttttttttttttgacagggtctcactctgtcacccaggctggagtgcagtggcaccaccatggctctctgcagccttgacctctgggagctcaagtgatcctcctgcctcagtctcctagtagctggaactacaaggaagggccaccacacctgactaacttttttgttttttgtttggtaaagatggcatttcgccatgttgtacaggctggtctcaaactcctaggttcactttggcctcccaaagtgctgggattacagacatgaactgccaggcccggccaaaataatgcaccacttttaacagaacagacagatgaggacagagctggtgataaaaaaaaaaaaaaaa

SEQ ID NO: 6098 - protein, 255 aa, Homo sapien; identical to SEQ ID NO: 1889

SEQ ID NO: 6099 - DNA, 1172 bp, Homo sapien; identical to SEQ ID NO: 1372

SEQ ID NO: 6100 - protein, 98 aa, Homo sapien; identical to SEQ ID NO: 1373

SEQ ID NO: 6101 - DNA, 3583 bp, Homo sapien
cgcggacccggccggcccaggcccgcgcccgccgcggccctgagaggccccggcaggtcccggcccggcggcggcagccatggccggggggccgggcccgggggagcccgcagcccccggcgcccagcacttcttgtacgaggtgccgccctgggtcatgtgccgcttctacaaagtgatggacgccctggagcccgccgactggtgccagttcgccgccctgatcgtgcgcgaccagaccgagctgcggctgtgcgagcgctccgggcagcgcacggccagcgtcctgtggccctggatcaaccgcaacgcccgtgtggccgacctcgtgcacatcctcacgcacctgcagctgctccgtgcgcgggacatcatcacagcctggcaccctcccgccccgcttccgtccccaggcaccactgccccgaggcccagcagcatccctgcacccgccgaggccgaggcctggagcccccggaagttgccatcctcagcctccaccttcctctccccagcttttccaggctcccagacccattcagggcctgagctcggcctggttccaagccctgcttccctgtggcctccaccgccatctccagccccttcttctaccaagccaggcccagagagctcagtgtccctcctgcagggagcccgcccctctccgttttgctggcccctctgtgagatttcccggggcacccacaacttctcggaggagctcaagatcggggagggtggctttgggtgcgtgtaccgggcggtgatgaggaacacggtgtatgctgtgaagaggctgaaggagaacgctgacctggagtggactgcagtgaagcagagcttcctgaccgaggtggagcagctgtccaggtttcgtcacccaaacattgtggactttgctggctactgtgctcagaacggcttctactgcctggtgtacggcttcctgcccaacggctccctggaggaccgtctccactgccagacccaggcctgcccacctctctcctggcctcagcgactggacatccttctgggtacagcccgggcaattcagtttctacatcaggacagccccagcctcatccatggagacatcaagagttccaacgtccttctggatgagaggctgacacccaagctgggagactttggcctggcccggttcagccgctttgccgggtccagccccagccagagcagcatggtggcccggacacagacagtgcggggcaccctggcctacctgcccgaggagtacatcaagacgggaaggctggctgtggacacggacaccttcagctttggggtggtagtgctagagaccttggctggtcagagggctgtgaagacgcacggtgccaggaccaagtatctgaaagacctggtggaagaggaggctgaggaggctggagtggctttgagaagcacccagagcacactgcaagcaggtctggctgcagatgcctgggctgctcccatcgccatgcagatctacaagaagcacctggaccccaggcccgggccctgcccacctgagctgggcctgggcctgggccagctggcctgctgctgcctgcaccgccgggccaaaaggaggcctcctatgacccaggtgtacgagaggctagagaagctgcaggcagtggtggcgggggtgcccgggcatttggaggccgccagctgcatccccccttccccgcaggagaactcctacgtgtccagcactggcagagcccacagtggggctgctccatggcagcccctggcagcgccatcaggagccagtgcccaggcagcagagcagctgcagagaggccccaaccagcccgtggagagtgacgagagcctaggcggcctctctgctgccctgcgctcctggcacttgactccaagctgccctctggacccagcacccctcagggaggccggctgtcctcagggggacacggcaggagaatcgagctgggggagtggcccaggatcccggcccacagccgtggaaggactggcccttggcagctctgcatcatcgtcgtcagagccaccgcagattatcatcaaccctgcccgacagaagatggtccagaagctggccctgtacgaggatggggccctggacagcctgcagctgctgtcgtccagctccctcccaggcttgggcctggaacaggacaggcaggggcccgaagaaagtgatgaatttcagagctgatgtgttcacctgggcagatcccccaaatccggaagtcaaagttctcatggtcagaagttctcatggtgcacgagtcctcagcactctgccggcagtgggggtgggggcccatgcccgcgggggagagaaggaggtggccctgctgttctaggctctgtgggcataggcaggcagagtggaaccctgcctccatgccagcatctgggggcaaggaaggctggcatcatccagtgaggaggctggcgcatgttgggaggctgctggctgcacagacccgtgaggggaggagaggggctgctgtgcaggggtgtggagtagggagctggctcccctgagagccatgcagggcgtctgcagcccaggcctctggcagcagctctttgcccatctctttggacagtggccaccctgcacaatggggccgacgaggcctagggccctcctacctgcttacaatttggaaaagtgtggccgggtgcggtggctcacgcctgtaatcccagcactttgggaggccaaggcaggaggatcgctggagcccagtaggtcaagaccagccagggcaacatgatgagaccctgtctctgccaaaaaattttttaaactattagcctggcgtggtagcgcacgcctgtggtcccagctgctggggaggctgaagtaggaggatcatttatgcttgggaggtcgaggctgcagtgagtcatgattgtatgactgcactccagcctgggtgacagagcaagaccctgtttcaaaaagaaaaaccctgggaaaagtgaagtatggctgtaagtctcatggttcagtcctagcaagaagcgagaattctgagatcctccagaaagtcgagcagcacccacctccaacctcgggccagtgtcttcaggctttactggggacctgcgagctggcctaatgtggtggcctgcaagccaggccatccctgggcgccacagacgagctccgagccaggtcaggcttcggaggccacaagctcagcctcaggcccaggcactgattgtggcagaggggccactacccaaggtctagctaggcccaagacctagttacccagacagtgagaagcccctggaaggcagaaaagttgggagcatggcagacagggaagggaaacattttcagggaaaagacatgtatcacatgtcttcagaagcaagtcaggtttcatgtaaccgagtgtcctcttgcgtgtccaaaagtagcccagggctgtagcacaggcttcacagtgattttgtgttcagccgtgagtcacactacatgcccccgtgaagctgggcattggtgacgtccaggttgtccttgagtaataaaaacgtatgttccctaaaaaaaaaaaaa

SEQ ID NO: 6102 - protein, 712 aa, Homo sapien
MAGGPGPGEPAAPGAQHFLYEVPPWVMCRFYKVMDALEPADWCQFAALIVRDQTELRLCERSGQRTASVLWPWINRNARVADLVHILTHLQLLRARDIITAWHPPAPLPSPGTTAPRPSSIPAPAEAEAWSPRKLPSSASTFLSPAFPGSQTHSGPELGLVPSPASLWPPPPSPAPSSTKPGPESSVSLLQGARPSPFCWPLCEISRGTHNFSEELKIGEGGFGCVYRAVMRNTVYAVKRLKENADLEWTAVKQSFLTEVEQLSRFRHPNIVDFAGYCAQNGFYCLVYGFLPNGSLEDRLHCQTQACPPLSWPQRLDILLGTARAIQFLHQDSPSLIHGDIKSSNVLLDERLTPKLGDFGLARFSRFAGSSPSQSSMVARTQTVRGTLAYLPEEYIKTGRLAVDTDTFSFGVVVLETLAGQRAVKTHGARTKYLKDLVEEEAEEAGVALRSTQSTLQAGLAADAWAAPIAMQIYKKHLDPRPGPCPPELGLGLGQLACCCLHRRAKRRPPMTQVYERLEKLQAVVAGVPGHLEAASCIPPSPQENSYVSSTGRAHSGAAPWQPLAAPSGASAQAAEQLQRGPNQPVESDESLGGLSAALRSWHLTPSCPLDPAPLREAGCPQGDTAGESSWGSGPGSRPTAVEGLALGSSASSSSEPPQIIINPARQKMVQKLALYEDGALDSLQLLSSSSLPGLGLEQDRQGPEESDEFQS

SEQ ID NO: 6103 - DNA, 1274 bp, Homo sapien
ggggagacgttcgcacacctgggtgccagcgccccagaggtcccgggacagcccgaggcgccgcgcccgccgccccgagctccccaagccttcgagagcggcgcacactcccggtctccactcgctcttccaacacccgctcgttttggcggcagctcgtgtcccagagaccgagttgccccagagaccgagacgccgccgctgcgaaggaccaatgagagccccgctgctaccgccggcgccggtggtgctgtcgctcttgatactcggctcaggccattatgctgctggattggacctcaatgacacctactctgggaagcgtgaaccattttctggggaccacagtgctgatggatttgaggttacctcaagaagtgagatgtcttcagggagtgagatttcccctgtgagtgaaatgccttctagtagtgaaccgtcctcgggagccgactatgactactcagaagagtatgataacgaaccacaaatacctggctatattgtcgatgattcagtcagagttgaacaggtagttaagcccccccaaaacaagacggaaagtgaaaatacttcagataaacccaaaagaaagaaaaagggaggcaaaaatggaaaaaatagaagaaacagaaagaagaaaaatccatgtaatgcagaatttcaaaatttctgcattcacggagaatgcaaatatatagagcacctggaagcagtaacatgcaaatgtcagcaagaatatttcggtgaacggtgtggggaaaagtccatgaaaactcacagcatgattgacagtagtttatcaaaaattgcattagcagccatagctgcctttatgtctgctgtgatcctcacagctgttgctgttattacagtccagcttagaagacaatacgtcaggaaatatgaaggagaagctgaggaacgaaagaaacttcgacaagagaatggaaatgtacatgctatagcataactgaagataaaattacaggatatcacattggagtcactgccaagtcatagccataaatgatgagtcggtcctctttccagtggatcataagacaatggaccctttttgttatgatggttttaaactttcaattgtcactttttatgctatttctgtatataaaggtgcacgaaggtaaaaagtattttttcaagttgtaaataatttatttaatatttaatggaagtgtatttattttacagctcattaaacttttttaaccaaacagatcaaaaaaaaaaaaaaaaaaaaaaaaaaaaaa

SEQ ID NO: 6104 - protein, 252 aa, Homo sapien; identical to SEQ ID NO: 1571

SEQ ID NO: 6105 - DNA, 2499 bp, Homo sapien
gatgcaagaagtttctaggaaaggccggacaccaggttttgagcaaaattttggactgtgaagcaaggcattggtgaagacaaaatggcctcgccggctgacagctgtatccagttcacccgccatgccagtgatgttcttctcaaccttaatcgtctccggagtcgagacatcttgactgatgttgtcattgttgtgagccgtgagcagtttagagcccataaaacggtcctcatggcctgcagtggcctgttctatagcatctttacagaccagttgaaatgcaaccttagtgtgatcaatctagatcctgagatcaaccctgagggattctgcatcctcctggacttcatgtacacatctcggctcaatttgcgggagggcaacatcatggctgtgatggccacggctatgtacctgcagatggagcatgttgtggacacttgccggaagtttattaaggccagtgaagcagagatggtttctgccatcaagcctcctcgtgaagagttcctcaacagccggatgctgatgccccaagacatcatggcctatcggggtcgtgaggtggtggagaacaacctgccactgaggagcgcccctgggtgtgagagcagagcctttgcccccagcctgtacagtggcctgtccacaccgccagcctcttattccatgtacagccacctccctgtcagcagcctcctcttctccgatgaggagtttcgggatgtccggatgcctgtggccaaccccttccccaaggagcgggcactcccatgtgatagtgccaggccagtccctggtgagtacagccggccgactttggaggtgtcccccaatgtgtgccacagcaatatctattcacccaaggaaacaatcccagaagaggcacgaagtgatatgcactacagtgtggctgagggcctcaaacctgctgccccctcagcccgaaatgccccctacttcccttgtgacaaggccagcaaagaagaagagagaccctcctcggaagatgagattgccctgcatttcgagccccccaatgcacccctgaaccggaagggtctggttagtccacagagcccccagaaatctgactgccagcccaactcgcccacagagtcctgcagcagtaagaatgcctgcatcctccaggcttctggctcccctccagccaagagccccactgaccccaaagcctgcaactggaagaaatacaagttcatcgtgctcaacagcctcaatcagaatgccaaaccagaggggcctgagcaggctgagctgggccgcctttccccacgagcctacacggccccacctgcctgccagccacccatggagcctgagaaccttgacctccagtccccaaccaagctgagtgccagcggggaggactccaccatcccacaagccagccggctcaataacatcgttaacaggtccatgacgggctctccccgcagcagcagcgagagccactcaccactctacatgcaccccccgaagtgcacgtcctgcggctctcagtccccacagcatgcagagatgtgcctccacaccgctggccccacgttccctgaggagatgggagagacccagtctgagtactcagattctagctgtgagaacggggccttcttctgcaatgagtgtgactgccgcttctctgaggaggcctcactcaagaggcacacgctgcagacccacagtgacaaaccctacaagtgtgaccgctgccaggcctccttccgctacaagggcaacctcgccagccacaagaccgtccataccggtgagaaaccctatcgttgcaacatctgtggggcccagttcaaccggccagccaacctgaaaacccacactcgaattcactctggagagaagccctacaaatgcgaaacctgcggagccagatttgtacaggtggcccacctccgtgcccatgtgcttatccacactggtgagaagccctatccctgtgaaatctgtggcacccgtttccggcaccttcagactctgaagagccacctgcgaatccacacaggagagaaaccttaccattgtgagaagtgtaacctgcatttccgtcacaaaagccagctgcgacttcacttgcgccagaagcatggcgccatcaccaacaccaaggtgcaataccgcgtgtcagccactgacctgcctccggagctccccaaagcctgctgaagcatggagtgttgatgctttcgtctccagccccttctcagaatctacccaaaggatactgtaacactttacaatgttcatcccatgatgtagtgcctctttcatccactagtgcaaatcatagctgggggttgtgggtggtgggggtcggggcctgggggactgggagccgcagcagctccccctcccccactgccataaaacattaagaaaatcatattgcttcttctcctatgtgtaaggtgaaccatgtcagcaaaaagcaaaatcattttatatgtcaaagcgggggag

SEQ ID NO: 6106 - protein, 706 aa, Homo sapien; identical to SEQ ID NO: 1008

SEQ ID NO: 6107 - DNA, 1773 bp, Homo sapien
ggaaaacagcagaggtgacagagcagccgtgctcgaagcgttcctggagcccaagctctcctccacaggtgaagacagggccagcaggagacaccatggggcacctctcagccccacttcacagagtgcgtgtaccctggcaggggcttctgctcacagcctcacttctaaccttctggaacccgcccaccactgcccagctcactactgaatccatgccattcaatgttgcagaggggaaggaggttcttctccttgtccacaatctgccccagcaactttttggctacagctggtacaaaggggaaagagtggatggcaaccgtcaaattgtaggatatgcaataggaactcaacaagctaccccagggcccgcaaacagcggtcgagagacaatataccccaatgcatccctgctgatccagaacgtcacccagaatgacacaggattctacaccctacaagtcataaagtcagatcttgtgaatgaagaagcaactggacagttccatgtatacccggagctgcccaagccctccatctccagcaacaactccaaccctgtggaggacaaggatgctgtggccttcacctgtgaacctgagactcaggacacaacctacctgtggtggataaacaatcagagcctcccggtcagtcccaggctgcagctgtccaatggcaacaggaccctcactctactcagtgtcacaaggaatgacacaggaccctatgagtgtgaaatacagaacccagtgagtgcgaaccgcagtgacccagtcaccttgaatgtcacctatggcccggacacccccaccatttccccttcagacacctattaccgtccaggggcaaacctcagcctctcctgctatgcagcctctaacccacctgcacagtactcctggcttatcaatggaacattccagcaaagcacacaagagctctttatccctaacatcactgtgaataatagtggatcctatacctgccacgccaataactcagtcactggctgcaacaggaccacagtcaagacgatcatagtcactgagctaagtccagtagtagcaaagccccaaatcaaagccagcaagaccacagtcacaggagataaggactctgtgaacctgacctgctccacaaatgacactggaatctccatccgttggttcttcaaaaaccagagtctcccgtcctcggagaggatgaagctgtcccagggcaacaccaccctcagcataaaccctgtcaagagggaggatgctgggacgtattggtgtgaggtcttcaacccaatcagtaagaaccaaagcgaccccatcatgctgaacgtaaactgtaagtgactcctcaccccttcctatatgtccctctaggattactctgtcaatggtgtgcaaaatggataaaactcacaggaggcagaatatcaatgaagagaccattatagcaaacagaattgcaaagtggttaagagctcagctcaggccgggcacagtggctcacgcctgtgatcccagcagtttgggaggccaaggcgggcggatcacgagggcaggagatcgaggccatcctggctaatatggtgaaaccccgtgtctactagaaatacaaaaaaaaattagccgggcatggtggcgggcgcctgtggtcccagctactcgggaggctgaggcgggagaatggcgtgaacctgggaggcggagctttcagtgagccgagatggtgccactgcactccagtctgggcaacagggcaagactctgtctc

SEQ ID NO: 6108 - protein, 417 aa, Homo sapien
MGHLSAPLHRVRVPWQGLLLTASLLTFWNPPTTAQLTTESMPFNVAEGKEVLLLVHNLPQQLFGYSWYKGERVDGNRQIVGYAIGTQQATPGPANSGRETIYPNASLLIQNVTQNDTGFYTLQVIKSDLVNEEATGQFHVYPELPKPSISSNNSNPVEDKDAVAFTCEPETQDTTYLWWINNQSLPVSPRLQLSNGNRTLTLLSVTRNDTGPYECEIQNPVSANRSDPVTLNVTYGPDTPTISPSDTYYRPGANLSLSCYAASNPPAQYSWLINGTFQQSTQELFIPNITVNNSGSYTCHANNSVTGCNRTTVKTIIVTELSPVVAKPQIKASKTTVTGDKDSVNLTCSTNDTGISIRWFFKNQSLPSSERMKLSQGNTTLSINPVKREDAGTYWCEVFNPISKNQSDPIMLNVNCK

SEQ ID NO: 6109 - DNA, 2328 bp, Homo sapien
agggggagcccaggagaccagaacatgaactccttcaattataccacccctgattatgggcactatgatgacaaggataccctggacctcaacacccctgtggataaaacttctaacacgctgcgtgttccagacatcctggccttggtcatctttgcagtcgtcttcctggtgggagtgctgggcaatgccctggtggtctgggtgacggcattcgaggccaagcggaccatcaatgccatctggttcctcaacttggcggtagccgacttcctctcctgcctggcgctgcccatcttgttcacgtccattgtacagcatcaccactggccctttggcggggccgcctgcagcatcctgccctccctcatcctgctcaacatgtacgccagcatcctgctcctggccaccatcagcgccgaccgctttctgctggtgtttaaacccatctggtgccagaacttccgaggggccggcttggcctggatcgcctgtgccgtggcttggggtttagccctgctgctgaccataccctccttcctgtaccgggtggtccgggaggagtactttccaccaaaggtgttgtgtggcgtggactacagccacgacaaacggcgggagcgagccgtggccatcgtccggctggtcctgggcttcctgtggcctctactcacgctcacgatttgttacactttcatcctgctccggacgtggagccgcagggccacgcggtccaccaagacactcaaggtggtggtggcagtggtggccagtttctttatcttctggttgccctaccaggtgacggggataatgatgtccttcctggagccatcgtcacccaccttcctgctgctgaataagctggactccctgtgtgtctcctttgcctacatcaactgctgcatcaaccccatcatctacgtggtggccggccagggcttccagggccgactgcggaaatccctccccagcctcctccggaacgtgttgactgaagagtccgtggttagggagagcaagtcattcacgcgctccacagtggacactatggcccagaagacccaggcagtgtaggcgacagcctcatgggccactgtggcccgatgtccccttccttcccggccattctccctcttgttttcacttcacttttcgtgggatggtgttaccttagctaactaactctcctccatgttgcctgtctttcccagacttgtccctccttttccagcgggactcttctcatccttcctcatttgcaaggtgaacacttccttctagggagcaccctcccaccccccacccccccccacacaccatctttccatcccaggcttttgaaaaacaaacagaaacccgtgtatctgggatatttccatatggcaataggtgtgaacagggaactcagaatacagacaagtagaaagattctcgcttaaaaaaatgtatttattttatggcaagttggaaaatatgtaactggaatctcaaaagttctttgggacaaaacagaagtccatggagttatctaagctcttgtaagtgagttaatttaaaaaagaaaattaggctgagagcagtggctcacgcctgtaatcccagaactttgggaggctaaggtgggtggatcacctgaggtcaagagttccagaccaggctggccagcatggtgaaaccccgtctgtactaaaaatacaaaaaattaactgggcatggtagtgggtgcctgtaatcccagctacttgggaggctgaggtgggagaattgctcgaaccttggaggtggaggttgtggtgagccatgatcgcaccactgcactctagcctgggtgaccgagggaggctctgtctcaaaagcaaagcaaaaacaaaaacaaaaacacctaaaaaacctgcagttttgtttgtactttgtttttaaattatgctttctattttgagatcattgcaaactcaacacaattgtaagtaatgatacagagggatcttgtgtacccttcacccagcctcccccaatggcaacatcttgcaaaactacaatgtagtctcataaccaggatattgacattgatacagtgaagatacaggacattctcatcaccacagggatccccaggatgcccacttccctccacccccacaccccagccgtgtccctaacccctggcaaccaggaatccactctccatttctataatgttgtcatttcaagaatgttattcaatggaatcatatagtatgtaacctgttttgagcttaaaaaaaaaagtatacatgactttaatgaggaaaataaaaatgaatattgaaaaaaaaaactttagag

SEQ ID NO: 6110 - protein, 350 aa, Homo sapien
MNSFNYTTPDYGHYDDKDTLDLNTPVDKTSNTLRVPDILALVIFAVVFLVGVLGNALVVWVTAFEAKRTINAIWFLNLAVADFLSCLALPILFTSIVQHHHWPFGGAACSILPSLILLNMYASILLLATISADRFLLVFKPIWCQNFRGAGLAWIACAVAWGLALLLTIPSFLYRVVREEYFPPKVLCGVDYSHDKRRERAVAIVRLVLGFLWPLLTLTICYTFILLRTWSRRATRSTKTLKVVVAVVASFFIFWLPYQVTGIMMSFLEPSSPTFLLLNKLDSLCVSFAYINCCINPIIYVVAGQGFQGRLRKSLPSLLRNVLTEESVVRESKSFTRSTVDTMAQKTQAV

SEQ ID NO: 6111 - DNA, 4238 bp, Homo sapien; identical to SEQ ID NO: 1464

SEQ ID NO: 6112 - protein, 786 aa, Homo sapien; identical to SEQ ID NO: 1465

SEQ ID NO: 6113 - DNA, 2562 bp, Homo sapien; identical to SEQ ID NO: 403

SEQ ID NO: 6114 - protein, 531 aa, Homo sapien; identical to SEQ ID NO: 404

SEQ ID NO: 6115 - DNA, 1125 bp, Homo sapien; identical to SEQ ID NO: 1298

SEQ ID NO: 6116 - protein, 281 aa, Homo sapien; identical to SEQ ID NO: 1299

SEQ ID NO: 6117 - DNA, 1036 bp, Homo sapien
cccgcctggagccctatggccaactgcgagttcagcccggtgtccggggacaaaccctgctgccggctctctaggagagcccaactctgtcttggcgtcagtatcctggtcctgatcctcgtcgtggtgctcgcggtggtcgtcccgaggtggcgccagcagtggagcggtccgggcaccaccaagcgctttcccgagaccgtcctggcgcgatgcgtcaagtacactgaaattcatcctgagatgagacatgtagactgccaaagtgtatgggatgctttcaagggtgcatttatttcaaaacatccttgcaacattactgaagaagactatcagccactaatgaagttgggaactcagaccgtaccttgcaacaagaaataaactatcaatcttgcccagactggagaaaggactgcagcaacaaccctgtttcagtattctggaaaacggtttcccgcaggtttgcagaagctgcctgtgatgtggtccatgtgatgctcaatggatcccgcagtaaaatctttgacaaaaacagcacttttgggagtgtggaagtccataatttgcaaccagagaaggttcagacactagaggcctgggtgatacatggtggaagagaagattccagagacttatgccaggatcccaccataaaagagctggaatcgattataagcaaaaggaatattcaattttcctgcaagaatatctacagacctgacaagtttcttcagtgtgtgaaaaatcctgaggattcatcttgcacatctgagatctgagccagtcgctgtggttgttttagctccttgactccttgtggtttatgtcatcatacatgactcagcatacctgctggtgcagagctgaagattttggagggtcctccacaataaggtcaatgccagagacggaagcctttttccccaaagtcttaaaataacttatatcatcagcatacctttattgtgatctatcaatagtcaagaaaaattattgtataagattagaatgaaaattgtatgttaagttactt

SEQ ID NO: 6118 - protein, 122 aa, Homo sapien
MANCEFSPVSGDKPCCRLSRRAQLCLGVSILVLILVVVLAVVVPRWRQQWSGPGTTKRFPETVLARCVKYTEIHPEMRHVDCQSVWDAFKGAFISKHPCNITEEDYQPLMKLGTQTVPCNKK

SEQ ID NO: 6119 - DNA, 1058 bp, Homo sapien
gggaagttctggaaggaagcatgtgctccagaggttgggattcgtgtctggctctggaattgctactgctgcctctgtcactcctggtgaccagcattcaaggtcacttggtacatatgaccgtggtctccggcagcaacgtgactctgaacatctctgagagcctgcctgagaactacaaacaactaacctggttttatactttcgaccagaagattgtagaatgggattccagaaaatctaagtactttgaatccaaatttaaaggcagggtcagacttgatcctcagagtggcgcactgtacatctctaaggtccagaaagaggacaacagcacctacatcatgagggtgttgaaaaagactgggaatgagcaagaatggaagatcaagctgcaagtgcttgaccctgtacccaagcctgtcatcaaaattgagaagatagaagacatggatgacaactgttatctgaaactgtcatgtgtgatacctggcgagtctgtaaactacacctggtatggggacaaaaggcccttcccaaaggagctccagaacagtgtgcttgaaaccacccttatgccacataattactccaggtgttatacttgccaagtcagcaattctgtgagcagcaagaatggcaccgtctgcctcagtccaccctgtaccctggcccggtcctttggagtagaatggattgcaagttggctagtggtcacggtgcccaccattcttggcctgttacttacctgagatgagctcttttaactcaagcgaaacttcaaggccagaagatcttgcctgttggtgatcatgctcctcaccaggacagagactgtataggctgaccagaagcatgctgctgaattatcaacgaggattttcaagttaacttttaaatactggttattatttaattttatatccctttgttgttttctagtacacagagatatagagatacacatgcttttttcccacccaaaattgtgacaacattatgtgaatgttttattattttttaaaataaacatttgatataattatcaattaactgaa

SEQ ID NO: 6120 - protein, 243 aa, Homo sapien; identical to SEQ ID NO: 1261

SEQ ID NO: 6121 - DNA, 1702 bp, Homo sapien; identical to SEQ ID NO: 2331

SEQ ID NO: 6122 - protein, 199 aa, Homo sapien; identical to SEQ ID NO: 2332

SEQ ID NO: 6123 - DNA, 433 bp, Homo sapien
tgctaccaagacagccacgaagatcctaccaaaatgaagcgcttcctcttcctcctactcaccatcagcctcctggttatggtacagatacaaactggactctcaggacaaaacgacaccagccaaaccagcagcccctcagcatccagcaacataagcggaggcattttccttttcttcgtggccaatgccataatccacctcttctgcttcagttgaggtgacacgtctcagccttagccctgtgccccctgaaacagctgccaccatcactcgcaagagaatcccctccatctttgggaggggttgatgccagacatcaccaggttgtagaagttgacaggcagtgccatgggggcaacagccaaaataggggggtaatgatgtaggggccaagcagtgcccagctgggggtcaataaagttacccttgt

SEQ ID NO: 6124 - protein, 61 aa, Homo sapien
MKRFLFLLLTISLLVMVQIQTGLSGQNDTSQTSSPSASSNISGGIFLFFVANAIIHLFCFS

SEQ ID NO: 6125 - DNA, 1001 bp, Homo sapien
gccgcggctgcggaacgggcggaggctgccggtttcgtaaccgtcgctcctcctcgctgactcgcgggctgtgaggcctgggtcggctcgggccgcaccgcgcggggccgctcggagtggaggccgcctgggggcaggcgggctagaggagcaggtacatgtgaagattttttggcagcttagcgtggaaaccattgatcaccctgctctcatttctacctgttctgtgttggcaagggagagtgcccaaatgagcaagatatcgcagcaaaacagcactccaggggtgaacggaattagtgttatccatacccaggcacatgccagcggcttacagcaggttcctcagctggtgcctgctggccctgggggaggaggcaaagctgtggctcccagcaagcagagcaaaaagagttcgcccatggatcgaaacagtgacgagtatcggcaacgccgagagaggaacaacatggctgtgaaaaagagccggttgaaaagcaagcagaaagcacaagacacactgcagagagtcaatcagctcaaagaagagaatgaacggttggaagcaaaaatcaaattgctgaccaaggaattaagtgtactcaaagatttgtttcttgagcatgcacacaaccttgcagacaacgtacagtccattagcactgaaaatacgacagcagatggcgacaatgcaggacagtagacctcaccctttccagactttagagcttgtggcttgaatgttaaaggtgtgaccaccgacaccactcatgtcaatggctgaaagttgtccatttccatgactcaaagacccattggaggctattttctgggatcagcactgaagagttgattagctaaaaatgttagccttgtaattcgaatatctggttttaaatgatagaggtttttgtgggaatcaaaatcccccaaatgttaaggtatatggtaaaaaaagaaatatctgggatcccgatgttcttaataaatcctgacttccc

SEQ ID NO: 6126 - protein, 150 aa, Homo sapien; identical to SEQ ID NO: 4606

SEQ ID NO: 6127 - DNA, 1804 bp, Homo sapien; identical to SEQ ID NO: 1222

SEQ ID NO: 6128 - protein, 190 aa, Homo sapien; identical to SEQ ID NO: 1223

SEQ ID NO: 6129 - DNA, 1030 bp, Homo sapien
atgaccatggaaacagttgaatcccagcatgatggaagtataacagcttctttgacagagagcaagtctgctcatgtgcagactcagactgggcaaatttcaatccctgctttagctcagtgcagtgagctgagatcaggcaccagaagaggctccccagctgtaactctagtgcagttaccttcgggccaaactatacatgtccagggagtaattcagacaccacagccatgggttattcagtcatcagaaatacacaccgttcaggtagcagcaattgcagagacagatgaatctgcagaatcagaaggtgtaattgattctcataaacgtagagaaatcctttcacgaagaccctcttataggaaaatactgaatgaactgtcctctgatgtgcctggtgttcccaagattgaagaagagagatcagaggaagaaggaacaccacctagtattgctaccatggcagtaccaactagcatatatcagactagcacggggcaatacattgctatagcccaaggtggaacaatccagatttctaacccaggatctgatggtgttcagggactgcaggcattaacaatgacaaattcaggagctcctccaccaggtgctacaattgtacagtacgcagcacaatcagctgatggcacacagcagttctttgtcccaggcagccaggttgttgttcaagctgccactggtgacatgccaacttaccagatccgagctcctactgctgctttgccacagggagtggtgatggctgcatcgcccggaagtttgcacagtccccagcagctggcagaagaagcaacacgcaaacgagagctgaggctaatgaaaaacagggaagctgccaaagaatgtcgacgtcgaaagaaagaatatgtaaaatgcctggagagccgagttgcagtgctggaagtccagaacaagaagcttatagaggaacttgaaaccttgaaagacatttgttctcccaaaactgattactagaaatatttaactatgaactgattacaga

SEQ ID NO: 6130 - protein, 333 aa, Homo sapien
MTMETVESQHDGSITASLTESKSAHVQTQTGQISIPALAQCSELRSGTRRGSPAVTLVQLPSGQTIHVQGVIQTPQPWVIQSSEIHTVQVAAIAETDESAESEGVIDSHKRREILSRRPSYRKILNELSSDVPGVPKIEEERSEEEGTPPSIATMAVPTSIYQTSTGQYIAIAQGGTIQISNPGSDGVQGLQALTMTNSGAPPPGATIVQYAAQSADGTQQFFVPGSQVVVQAATGDMPTYQIRAPTAALPQGVVMAASPGSLHSPQQLAEEATRKRELRLMKNREAAKECRRRKKEYVKCLESRVAVLEVQNKKLIEELETLKDICSPKTDY

SEQ ID NO: 6131 - DNA, 3454 bp, Homo sapien
ggaaatgactgctgtccatgcaggcaacataaacttcaagtgggatcctaaaagtctagagatcaggactctggcagttgagagactgttggagcctcttgttacacaggttacaacccttgtaaacaccaatagtaaagggccctctaataagaagagaggtcgttctaagaaggcccatgttttggctgcatctgttgaacaagcaactgagaatttcttggagaagggggataaaattgcaaaagagagccagtttctcaaggaggagcttgtggttgctgtagaagatgttcgaaaacaaggtgatttgatgaaggctgctgctggagagttcgcagatgatccctgctcttctgtgaagcgaggcaacatggttcgggcagctcgagctttgctctctgctgttacccggttgctcattttggctgacatggcagatgtctacaaattacttgttcagctgaaagttgtggaagatggtatattgaaactgaggaatgctggcaatgaacaagacttagggaatcagtataaagccctaaaacctgaagtggataagctgaacattatggcagcaaaaagacaacaggaattgaaagatgttgggcatcgtgatcagatggctgcggctagaggaatcctgcagagcaacgttccgatcctctatactgcatcccaggcatgcctacagcaccctgatgtcgcagcctataaggccaacagggacctgatatacaagcagctgcagcaggcggtcacagggatttccaatgcagcccaggccactgcctcagacgatgcctcacagcaccagggtggaggaggaggagaactggcatatgcactcaataactttgacaaacaaatcattgtggaccccttgagcttcagcgaggagcgctttaggccttccctggaggagcgtctggaaagcatcattagtggggctgccttgatggccgactcgtcctgcacgcgtgatgaccgtcgtgagcgaattgtggcagagtgtaatgctgtccgccaggcctgcaggacctgcgtttcggagtacatgggcaatgctggacgtaaagaaagaagtgatgcactcaattctgcaatagataaaatgaccaagaagaccagggacttgcgtagacagcttcgcaaagctgtcatggaccacgtttcagattctttcctggaaaccaatgttccacttttggtattgattgaagctgcaaagaatggaaatgagaaagaagttaaggaatatgcccaagttttccgtgaacatgccaacaaattgattgaggttgccaacttggcctgttccatctcaaataatgaagaaggtgtaaagcttgttcgaatgtctgcaagccagttagaagccggttgtcctcaggttattaatgctgcaacctgggctttagcaccaaaaccacagagtaaactggcccaagagaacatggatctttttaaagaacaatgggaaaaacaagtccgtgttctcacagatgctgtcgatgacattacttccattgatgacttcttggctgtctcagagaatcacattttggaagatgtgaacaaatgtgtcattgctctccaagagaaggatgtggatggcctggaccgcacagctggtgcaattcgaggccgggcagcccgggtcattcacgtagtcacctcagagatggacaactatgagccaggagtctacacagagaaggttctggaagccactaagctgctctccaacacagtcatgccacgttttactgagcaagtagaagcagccgtggaagccctcagctcggaccctgcccagcccatggatgagaatgagtttatcgatgcttcccgcctggtatatgatggcatccgggacatcaggaaagcagtgctgatgataaggacccctgaggagttggatgactctgactttgagacagaggattttgatgtcagaagcgagacgagcgtccagacagaagacgatcagctgatagctggccagagtgcccgggcgatcatggctcagcttccccaggagcaaaaagcgaagattcgggaacaggtggccagcttccaggaagaaaagagcaagctggatgctgaagtgtccaaatgggacgacagtggcaatgacatcattgtgctggccaagcagatgtgcatgattatgatggagatgacagactttacccgaggtaaaggaccactcaaaaatacatcggatgtcatcagtgctgccaagaaaattgctgaggcaggatccaggatggacaagcttggccggaccattcgagaccattgccccgactcggcttgcaagcaggacctgctggcctacctgcaacgcatcgccctctactgccaccagctgaacatctgcagcaaggtcaaggccgaggtgcagaatctcggcggggagcttgttgtctctggggtggacagcgccatgtccctgatccaggcagccaagaacttgatgaatgctgtggtgcagacagtgaaggcatcctacgtcgcctctaccaaataccaaaagtcacagggtatggcttccctcaaccttcctgctgtgtcaatgaagatgaaggcaccagagaaaaagccattggtgaagagagagaaacaggatgagacacagaccaagattaaacgggcatctcagaagaagcacgtgaacccagtgcaggccctcagcgagttcaaagctatggacagcatctaagtctgcccaggccggccgcccccacccctctggctcctgaatatcagtcactgttcgtcactcaaatgaatttgctaaatacaacactgatactagattccacagggaaatgggcagactgaaccagtccaggtggtgaattttccaagaacatagtttaagttgattaaaaatgcttttagaatgcaggagcctacttctagctgtattttttgtatgcttaaataaaataaaattcataaccaagagatccacattagcttgttagtaatgctctgaccaagccgagatgccattctcttagtgatggcggcgttaggtttgagagaaggaattggctcaacttcagttgagagggtgcagtccagacagcttgactgcttttaaatgaccaaagatgacctgtggtaagcaacctggcatcttaggaagcagtccttgagaaggcatgttccagaaaggtctctgaggacaaactcactcagtaaaacataatgtatcatgaagaaaactgattctctatgacatgaaatgaaaattttaatgcattgttataattactaatgtacgctgctgcaggacattaataaagttgcttttttaggctacagtgtctcgatgccataatcagaacacactttttttcctctttctcccagcttcaaatgcacaattcatcattgggctcacttctaataactgcagtgtttccgccttgcgttgcag

SEQ ID NO: 6132 - protein, 907 aa, Homo sapien
MTAVHAGNINFKWDPKSLEIRTLAVERLLEPLVTQVTTLVNTNSKGPSNKKRGRSKKAHVLAASVEQATENFLEKGDKIAKESQFLKEELVVAVEDVRKQGDLMKAAAGEFADDPCSSVKRGNMVRAARALLSAVTRLLILADMADVYKLLVQLKVVEDGILKLRNAGNEQDLGNQYKALKPEVDKLNIMAAKRQQELKDVGHRDQMAAARGILQSNVPILYTASQACLQHPDVAAYKANRDLIYKQLQQAVTGISNAAQATASDDASQHQGGGGGELAYALNNFDKQIIVDPLSFSEERFRPSLEERLESIISGAALMADSSCTRDDRRERIVAECNAVRQACRTCVSEYMGNAGRKERSDALNSAIDKMTKKTRDLRRQLRKAVMDHVSDSFLETNVPLLVLIEAAKNGNEKEVKEYAQVFREHANKLIEVANLACSISNNEEGVKLVRMSASQLEAGCPQVINAATWALAPKPQSKLAQENMDLFKEQWEKQVRVLTDAVDDITSIDDFLAVSENHILEDVNKCVIALQEKDVDGLDRTAGAIRGRAARVIHVVTSEMDNYEPGVYTEKVLEATKLLSNTVMPRFTEQVEAAVEALSSDPAQPMDENEFIDASRLVYDGIRDIRKAVLMIRTPEELDDSDFETEDFDVRSETSVQTEDDQLIAGQSARAIMAQLPQEQKAKIREQVASFQEEKSKLDAEVSKWDDSGNDIIVLAKQMCMIMMEMTDFTRGKGPLKNTSDVISAAKKIAEAGSRMDKLGRTIRDHCPDSACKQDLLAYLQRIALYCHQLNICSKVKAEVQNLGGELVVSGVDSAMSLIQAAKNLMNAVVQTVKASYVASTKYQKSQGMASLNLPAVSMKMKAPEKKPLVKREKQDETQTKIKRASQKKHVNPVQALSEFKAMDSI

SEQ ID NO: 6133 - DNA, 2029 bp, Homo sapien
ggctccggcaaccgctccggcaacgccaaccgctccgctgcgcgcaggctgggctgcaggctctcggctgcagcgctgggctggtgtgcagtggtgcgaccacggctcacggcagcctcagccacccagatgtaagcgatctggttcccacctcagcctcccgagtagtggatctaggatccggcttccaacatgtggcagctctgggcctccctctgctgcctgctggtgttggccaatgcccggagcaggccctctttccatcccgtgtcggatgagctggtcaactatgtcaacaaacggaataccacgtggcaggccgggcacaacttctacaacgtggacatgggctacttgaagaggctatgtggtaccttcctgggtgggcccaagccaccccagagagttatgtttaccgaggacctgaagctgcctgcaagcttcgatgcacgggaacaatggccacagtgtcccaccatcaaagagatcagagaccagggctcctgtggctcctgctgggccttcggggctgtggaagccatctctgaccggatctgcatccacaccaatgcgcacgtcagcgtggaggtgtcggcggaggacctgctcacctgctgtggcagcatgtgtggggacggctgtaatggtggctatcctgctgaagcttggaacttctggacaagaaaaggcctggtttctggtggcctctatgaatcccatgtagggtgcagaccgtactccatccctccctgtgagcaccacgtcaacggctcccggcccccatgcacgggggagggagatacccccaagtgtagcaagatctgtgagcctggctacagcccgacctacaaacaggacaagcactacggatacaattcctacagcgtctccaatagcgagaaggacatcatggccgagatctacaaaaacggccccgtggagggagctttctctgtgtattcggacttcctgctctacaagtcaggagtgtaccaacacgtcaccggagagatgatgggtggccatgccatccgcatcctgggctggggagtggagaatggcacaccctactggctggttgccaactcctggaacactgactggggtgacaatggcttctttaaaatactcagaggacaggatcactgtggaatcgaatcagaagtggtggctggaattccacgcaccgatcagtactgggaaaagatctaatctgccgtgggcctgtcgtgccagtcctgggggcgagatcggggtagaaatgcattttattctttaagttcacgtaagatacaagtttcagacagggtctgaaggactggattggccaaacatcagacctgtcttccaaggagaccaagtcctggctacatcccagcctgtggttacagtgcagacaggccatgtgagccaccgctgccagcacagagcgtccttccccctgtagactagtgccgtagggagtacctgctgccccagctgactgtggccccctccgtgatccatccatctccagggagcaagacagagacgcaggaatggaaagcggagttcctaacaggatgaaacttcccccatcagttcccccagtacctccaagcaagtagctttccacatttgtcacagaaatcagaggagagatggtgttgggagccctttggagaacgccagtctcccaggccccctgcatctatcgagtttgcaatgtcacaacctctctgatcttgtgctcagcatgattctttaatagaagttttattttttcgtgcactctgctaatcatgtgggtgagccagtggaacagcgggagacctgtgctagttttacagattgcctcctaatgacgcggctcaaaaggaaaccaagtggtcaggagttgtttctgacccactgatctctactaccacaaggaaaatagtttaggagaaaccagcttttactgtttttgaaaaattacagcttcaccctgtcaagttaacaaggaatgcctgtgccaataaaaggtttctccaaaaaaaaaaaaaaaaaa

SEQ ID NO: 6134 - protein, 339 aa, Homo sapien [sequence omitted]

SEQ ID NO: 6135 - DNA, 1575 bp, Homo sapien
agaaccgcgacctccgcaaccttgagcggcatccgtggagtgcgcctgcagctacgaccgcagcaggaaagcgccgccggccaggcccagctgtggccggacagggactggaagagaggacgcggtcgagtaggtgtgcaccagccctggcaacgagagcgtctaccccgaactctgctggccttgaggtggggaagccggggagggcagttgaggaccccgcggaggcgcgtgactggttgagcgggcaggccagcctccgagccgggtggacacaggttttaaaacatgaatcctacactcatccttgctgccttttgcctgggaattgcctcagctactctaacatttgatcacagtttagaggcacagtggaccaagtggaaggcgatgcacaacagattatacggcatgaatgaagaaggatggaggagagcagtgtgggagaagaacatgaagatgattgaactgcacaatcaggaatacagggaagggaaacacagcttcacaatggccatgaacgcctttggagacatgaccagtgaagaattcaggcaggtgatgaatggctttcaaaaccgtaagcccaggaaggggaaagtgttccaggaacctctgttttatgaggcccccagatctgtggattggagagagaaaggctacgtgactcctgtgaagaatcagggtcagtgtggttcttgttgggcttttagtgctactggtgctcttgaaggacagatgttccggaaaactgggaggcttatctcactgagtgagcagaatctggtagactgctctgggcctcaaggcaatgaaggctgcaatggtggcctaatggattatgctttccagtatgttcaggataatggaggcctggactctgaggaatcctatccatatgaggcaacagaagaatcctgtaagtacaatcccaagtattctgttgctaatgacaccggctttgtggacatccctaagcaggagaaggccctgatgaaggcagttgcaactgtggggcccatttctgttgctattgatgcaggtcatgagtccttcctgttctataaagaaggcatttattttgagccagactgtagcagtgaagacatggatcatggtgtgctggtggttggctacggatttgaaagcacagaatcagataacaataaatattggctggtgaagaacagctggggtgaagaatggggcatgggtggctacgtaaagatggccaaagaccggagaaaccattgtggaattgcctcagcagccagctaccccactgtgtgagctggtggacggtgatgaggaaggacttgactggggatggcgcatgcatgggaggaattcatcttcagtctaccagcccccgctgtgtcggatacacactcgaatcattgaagatccgagtgtgatttgaattctgtgatattttcacactggtaaatgttacctctattttaattactgctataaataggtttatattattgattcacttactgactttgcattttcgtttttaaaaggatgtataaatttttacctgtttaaataaaatttaatttcaaatgt

SEQ ID NO: 6136 - protein, 333 aa, Homo sapien [sequence omitted]

SEQ ID NO: 6137 - DNA, 542 bp, Homo sapien; identical to SEQ ID NO: 1858

SEQ ID NO: 6138 - protein, 97 aa, Homo sapien; identical to SEQ ID NO: 1859

SEQ ID NO: 6139 - DNA, 1071 bp, Homo sapien
gcagttctggtcctcctaggagcggccgcctgcgcggcgcggccccgtggtcggatgctgggcggcagagaggccgaggcgcacgcgcggccctacatggcgtcggtgcagctgaacggcgcgcacctgtgcgcaggcgtcctggtggcggagcggtgggtgctgagcgcggcgcactgcctggaggacgcggccgacgggaaggtgcaggttctcctgggcgcgcactccctgtcgcagccggagccctccaagcgcctgtacgacgtgctccgcgcagtgccccacccggacagccagcccgacaccatcgaccacgacctcctgctgctacagctgtcggagaaggccacactgggccctgctgtgcgccccctgccctggcagcgcgtggaccgcgacgtggcaccgggaactctctgcgacgtggccggctggggcatagtcaaccacgcgggccgccgcccggacagcctgcagcacgtgctcttgccagtgctggaccgcgccacctgcaaccggcgcacgcaccacgacggcgccatcaccgagcgcttgatgtgcgcggagagcaatcgccgggacagctgcaagggtgactccgggggcccgctggtgtgcgggggcgtgctcgagggcgtggtcacctcgggctcgcgcgtttgcggcaaccgcaagaagcccgggatctacacccgcgtggcgagctatgcggcctggatcgacagcgtcctggcctagggtgccggggcctgaaggtcagggtcacccaagcaacaaagtcccgagcaatgaagtcatccactcctgcatctggttggtctttattgagcacctactatatgcagaaggggaggccgaggtgggaggatcattggatctcaggagttggagatcagcatgggccacgtagcgcgactccatctctacaaataaataaaaattagctgggcaattggcgggcatggaggtgggtgcttgtagttccagctactcaggaggctgaggtgggaggatgacttgaacgcaggaggctgaggctgcagtgagttgtgattgcaccactgccct

SEQ ID NO: 6140 - protein, 228 aa, Homo sapien
MLGGREAEAHARPYMASVQLNGAHLCAGVLVAERWVLSAAHCLEDAADGKVQVLLGAHSLSQPEPSKRLYDVLRAVPHPDSQPDTIDHDLLLLQLSEKATLGPAVRPLPWQRVDRDVAPGTLCDVAGWGIVNHAGRRPDSLQHVLLPVLDRATCNRRTHHDGAITERLMCAESNRRDSCKGDSGGPLVCGGVLEGVVTSGSRVCGNRKKPGIYTRVASYAAWIDSVLA

SEQ ID NO: 6141 - DNA, 3407 bp, Homo sapien
cgcgcgtctccgccgcccgcgtgacttctgcctgcgctccttctctgaacgctcacttccgaggagacgccgacgatgaagacaccgtggaagattcttctgggactgctgggtgctgctgcgcttgtcaccatcatcaccgtgcccgtggttctgctgaacaaaggcacagatgatgctacagctgacagtcgcaaaacttacactctaactgattacttaaaaaatacttatagactgaagttatactccttaagatggatttcagatcatgaatatctctacaaacaagaaaataatatcttggtattcaatgctgaatatggaaacagctcagttttcttggagaacagtacatttgatgagtttggacattctatcaatgattattcaatatctcctgatgggcagtttattctcttagaatacaactacgtgaagcaatggaggcattcctacacagcttcatatgacatttatgatttaaataaaaggcagctgattacagaagagaggattccaaacaacacacagtgggtcacatggtcaccagtgggtcataaattggcatatgtttggaacaatgacatttatgttaaaattgaaccaaatttaccaagttacagaatcacatggacggggaaagaagatataatatataatggaataactgactgggtttatgaagaggaagtcttcagtgcctactctgctctgtggtggtctccaaacggcacttttttagcatatgcccaatttaacgacacagaagtcccacttattgaatactccttctactctgatgagtcactgcagtacccaaagactgtacgggttccatatccaaaggcaggagctgtgaatccaactgtaaagttctttgttgtaaatacagactctctcagctcagtcaccaatgcaacttccatacaaatcactgctcctgcttctatgttgataggggatcactacttgtgtgatgtgacatgggcaacacaagaaagaatttctttgcagtggctcaggaggattcagaactattcggtcatggatatttgtgactatgatgaatccagtggaagatggaactgcttagtggcacggcaacacattgaaatgagtactactggctgggttggaagatttaggccttcagaacctcattttacccttgatggtaatagcttctacaagatcatcagcaatgaagaaggttacagacacatttgctatttccaaatagataaaaaagactgcacatttattacaaaaggcacctgggaagtcatcgggatagaagctctaaccagtgattatctatactacattagtaatgaatataaaggaatgccaggaggaaggaatctttataaaatccaacttattgactatacaaaagtgacatgcctcagttgtgagctgaatccggaaaggtgtcagtactattctgtgtcattcagtaaagaggcgaagtattatcagctgagatgttccggtcctggtctgcccctctatactctacacagcagcgtgaatgataaagggctgagagtcctggaagacaattcagctttggataaaatgctgcagaatgtccagatgccctccaaaaaactggacttcattattttgaatgaaacaaaattttggtatcagatgatcttgcctcctcattttgataaatccaagaaatatcctctactattagatgtgtatgcaggcccatgtagtcaaaaagcagacactgtcttcagactgaactgggccacttaccttgcaagcacagaaaacattatagtagctagctttgatggcagaggaagtggttaccaaggagataagatcatgcatgcaatcaacagaagactgggaacatttgaagttgaagatcaaattgaagcagccagacaattttcaaaaatgggatttgtggacaacaaacgaattgcaatttggggctggtcatatggagggtacgtaacctcaatggtcctgggatcgggaagtggcgtgttcaagtgtggaatagccgtggcgcctgtatcccggtgggagtactatgactcagtgtacacagaacgttacatgggtctcccaactccagaagacaaccttgaccattacagaaattcaacagtcatgagcagagctgaaaattttaaacaagttgagtacctccttattcatggaacagcagatgataacgttcactttcagcagtcagctcagatctccaaagccctggtcgatgttggagtggatttccaggcaatgtggtatactgatgaagaccatggaatagctagcagcacagcacaccaacatatatatacccacatgagccacttcataaaacaatgtttctctttaccttagcacctcaaaataccatgccatttaaagcttattaaaactcatttttgttttcattatctcaaaactgcactgtcaagatgatgatgatctttaaaatacacactcaaatcaagaaacttaaggttacctttgttcccaaatttcatacctatcatcttaagtagggacttctgtcttcacaacagattattaccttacagaagtttgaattatccggtcgggttttattgtttaaaatcatttctgcatcagctgctgaaacaacaaataggaattgtttttatggaggctttgcatagattccctgagcaggattttaatctttttctaactggactggttcaaatgttgttctcttctttaaagggatggcaagatgtgggcagtgatgtcactagggcagggacaggataagagggattagggagagaagatagcagggcatggctgggaacccaagtccaagcataccaacacgagcaggctactgtcagctcccctcggagaagagctgttcaccacgagactggcacagttttctgagaaagactattcaaacagtctcaggaaatcaaatatcgaaagcactgacttctaagtaaaccacagcagttgaaagactccaaagaaatgtaagggaaactgccagcaacgcagcccccaggtgccagttatggctataggtgctacaaaaacacagcaagggtgatgggaaagcattgtaaatgtgcttttaaaaaaaaatactgatgttcctagtgaaagaggcagcttgaaactgagatgtgaacacatcagcttgccctgttaaaagatgaaaatatttgtatcacaaatcttaacttgaaggagtccttgcatcaatttttcttatttcatttctttgagtgtcttaattaaaagaatattttaacttccttggactcattttaaaaaatggaacataaaatacaatgttatgtattattattcccattctacatactatggaatttctcccagtcatttaataaatgtgccttcattttttc

SEQ ID NO: 6142 - protein, 766 aa, Homo sapien [sequence omitted]

SEQ ID NO: 6143 - DNA, 1752 bp, Homo sapien
cgggggggcccgaccaccgcggggccgggacgcgatggcggcggcagagcccgcgagctcgggccagcaggcgccggcagggcaggggcagggccagcggccgccgccgcagcctccgcaggcgcaagccccgcagccgcccccgccgccgcagctcgggggcgcggggggcggcagcagcaggcacgagaagagcctggggctgctcactaccaagttcgtgtcgctgctgcaggaggccaaggacggcgttctggatctcaaagcggctgctgatactttggctgtgaggcaaaaaaggagaatttatgatatcaccaatgtcttagagggaattgacttgattgaaaaaaagtcaaaaaacagtatccagtggaaaggtgtaggtgctggctgtaatactaaagaagtcatagatagattaagatatcttaaagctgaaattgaagatctagaactgaaggaaagagaacttgatcagcagaagttgttgctacagcaaagcatcaaaaatgtgatggacgattccattaataatagattttcctatgtaactcatgaagacatctgtaattgctttaatggtgatacacttttggccattcaggcaccttctggtacacaactggaggtacccattccagaaatgggtcagaatggacaaaagaaataccagatcaatctaaagagtcattcaggacctatccatgtgctgcttataaataaagagtcgagttcatctaagcccgtggtttttcctgttcccccacctgatgacctcacacagccttcctcccagtccttgactccagtgactccacagaaatccagcatggcaactcaaaatctgcctgagcaacatgtctctgaaagaagccaggctctgcagcagacatcagctacagatatatcttcagcaggatctattagtggagatatcattgatgagttaatgtcttctgacgtgtttcctctcttaaggctttctcctaccccggcagatgactacaactttaatttagatgataacgaaggagtttgtgatctgtttgatgtccagatactaaattattagattccatggaaacttgggactgttatctacctctaactgtgtaacattttagacttcttaataacctaaatatttaaaataatgaatgtaacaccttttttagttcactgattctgaagtgttcttccctaatactttctttacttcacaaaacttcaaccataaaaacaaagggctctgattgctttaggggataagtgatttaatattcacaaacgtccccactcccaaaagtaactatattctggatttcaacttttcttctaattgtgaatccttccgttttttcttcttaaggaggaaagttaaaggacactacaggtcatcaaaaacaagttggccaaggactcattacttgtcttatatttttactgccactaaactgcctgtatttctgtatgtccttctatccaaacagacgttcactgccacttgtaaagtgaaggatgtaaacgaggatatataactgtttcagtgaacagattttgtgaagtgccttctgttttagcactttaagtttatcacattttgttgacttctgacattccactttcctaggttataggaaagatctgtttatgtagtttgtttttaaaatgtgccaatgcctgtacattaacagatttttaaaaataaaattgtataaaacattaaaaaaaaaaaaaaaaaaaaaaaaa

SEQ ID NO: 6144 - protein, 346 aa, Homo sapien
MAAAEPASSGQQAPAGQGQGQRPPPQPPQAQAPQPPPPPQLGGAGGGSSRHEKSLGLLTTKFVSLLQEAKDGVLDLKAAADTLAVRQKRRIYDITNVLEGIDLIEKKSKNSIQWKGVGAGCNTKEVIDRLRYLKAEIEDLELKERELDQQKLLLQQSIKNVMDDSINNRFSYVTHEDICNCFNGDTLLAIQAPSGTQLEVPIPEMGQNGQKKYQINLKSHSGPIHVLLINKESSSSKPVVFPVPPPDDLTQPSSQSLTPVTPQKSSMATQNLPEQHVSERSQALQQTSATDISSAGSISGDIIDELMSSDVFPLLRLSPTPADDYNFNLDDNEGVCDLFDVQILNY

SEQ ID NO: 6145 - DNA, 2043 bp, Homo sapien
atgagtcagcagcggccggcgaggaagttacccagtctcctcctggacccgacggaggagacggttcgccgtcggtgccgagaccccatcaacgtggagggcctgctgccatcaaaaataaggattaatttagaagataatgtacaatatgtgtccatgagaaaagctctaaaagtgaagagacctcgttttgatgtatcgctggtttatttaactcgaaaatttatggatcttgtcagatctgctcccgggggtattcttgacttaaacaaggttgcaacgaaactgggagtccgaaagcggagagtgtatgacatcaccaatgtcttagatggaatcgacctcgttgaaaagaaatccaagaaccatattagatggataggatctgatcttagcaattttggagcagttccccaacaaaagaagctacaggaggaactttctgacttatcagcaatggaagatgctttggatgagttaattaaggattgtgctcagcagctgtttgagttaacagatgacaaagaaaatgaaagactagcatatgtgacctatcaagacattcatagcattcaggccttccatgaacagatcgtcattgcagttaaagctccagcagaaaccagattggatgttccagctcccagagaagactctatcacagtgcacataaggagcaccaacggacctatcgatgtctatttgtgtgaagtggagcagggtcagaccagtaacaaaaggtctgaaggtgtcgggacctcttcatctgagagcactcatccagaaggccctgaggaagaagaaaatcctcagcaaagtgaagaattgcttgaagtaagcaactgatggcatttgagaatttatgtatcactgagttttttgggaatatcttcgtggagaattacgcatcaaatttgattctcagagcaataaattatccatgaagtgctctcgttctcagtagcggcatcatggccagtagtgtctttgaggagttcaccacttagattactgagtaattgtggtttccacatttgaaaacaactccttttataattattcactgctttttgtcagtgaaatagacatcttgcctcctcaagtagcttcatcacagagtgtcatgaagacagacagtcaggctgaaatggacagttctttgtggactctacccttcccttcaaggagtatgtcatatatcacaaaagaaattgccttacactggttcacgtttgcagttacctgttgtacattgcatagatgtacacacgaatttaaatgtgatgtctttgtatatatctgtataatgttgagattacttacgaaatatgtctgagtgacacttttcacccttgtacagccaaaataatgtatatatggaaagtgacagacaaattctctaatctctttggtatctataacttattagaatcctctggatgagggttagaagagactttttccaaacttctacatgtagaagtatcataaatgtgctacacatttatgtttgtggatttaattaaagtattttaatatggttttcagtgctaaaattggagtcagatacttcttggttttaagctgtctacctaattgctgtctcccagcagactggtggcatgcccagtggctttgggggcaaggatagaaatgccatcaggaaatagctgaattcattgtgaaacatgaattcagtcatggtgataattggaaactcctttcaggtttttgcaagtagattttgtaatgtttgtgtatgcagccttgctgttgagtcagtccaaggggttttacttaggacaagttgtaccttgccctctctccagctctgctcccacattttcacatacctagctgtttctacctcattgggtaactcatttaccactctgtgcctcagtttactctgtagtttaccattagactgtgagctccttgagggactttgtcataatcactgttacatcccagtgcctcacaccatgcctggcccttaagaagtgctcaataaatgtctgaacaaataaaaaaaaaaaaaaa

SEQ ID NO: 6146 - protein, 281 aa, Homo sapien
MSQQRPARKLPSLLLDPTEETVRRRCRDPINVEGLLPSKIRINLEDNVQYVSMRKALKVKRPRFDVSLVYLTRKFMDLVRSAPGGILDLNKVATKLGVRKRRVYDITNVLDGIDLVEKKSKNHIRWIGSDLSNFGAVPQQKKLQEELSDLSAMEDALDELIKDCAQQLFELTDDKENERLAYVTYQDIHSIQAFHEQIVIAVKAPAETRLDVPAPREDSITVHIRSTNGPIDVYLCEVEQGQTSNKRSEGVGTSSSESTHPEGPEEEENPQQSEELLEVSN

SEQ ID NO: 6147 - DNA, 1600 bp, Homo sapien; identical to SEQ ID NO: 1474

SEQ ID NO: 6148 - protein, 482 aa, Homo sapien; identical to SEQ ID NO: 1475

SEQ ID NO: 6149 - DNA, 991 bp, Homo sapien; identical to SEQ ID NO: 3043

SEQ ID NO: 6150 - protein, 281 aa, Homo sapien [sequence omitted]

SEQ ID NO: 6151 - DNA, 3110 bp, Homo sapien
gccgccgccgccatccgccgccgcagccagcttccgccgccgcaggaccggcccctgccccagcctccgcagccgcggcgcgtccacgcccgcccgcgcccagggcgagtcggggtcgccgcctgcacgcttctcagtgttccccgcgccccgcatgtaacccggccaggcccccgcaactgtgtcccctgcagctccagccccgggctgcacccccccgccccgacaccagctctccagcctgctcgtccaggatggccgcggccaaggccgagatgcagctgatgtccccgctgcagatctctgacccgttcggatcctttcctcactcgcccaccatggacaactaccctaagctggaggagatgatgctgctgagcaacggggctccccagttcctcggcgccgccggggccccagagggcagcggcagcaacagcagcagcagcagcagcgggggcggtggaggcggcgggggcggcagcaacagcagcagcagcagcagcaccttcaaccctcaggcggacacgggcgagcagccctacgagcacctgaccgcagagtcttttcctgacatctctctgaacaacgagaaggtgctggtggagaccagttaccccagccaaaccactcgactgccccccatcacctatactggccgcttttccctggagcctgcacccaacagtggcaacaccttgtggcccgagcccctcttcagcttggtcagtggcctagtgagcatgaccaacccaccggcctcctcgtcctcagcaccatctccagcggcctcctccgcctccgcctcccagagcccacccctgagctgcgcagtgccatccaacgacagcagtcccatttactcagcggcacccaccttccccacgccgaacactgacattttccctgagccacaaagccaggccttcccgggctcggcagggacagcgctccagtacccgcctcctgcctaccctgccgccaagggtggcttccaggttcccatgatccccgactacctgtttccacagcagcagggggatctgggcctgggcaccccagaccagaagcccttccagggcctggagagccgcacccagcagccttcgctaacccctctgtctactattaaggcctttgccactcagtcgggctcccaggacctgaaggccctcaataccagctaccagtcccagctcatcaaacccagccgcatgcgcaagtaccccaaccggcccagcaagacgcccccccacgaacgcccttacgcttgcccagtggagtcctgtgatcgccgcttctcccgctccgacgagctcacccgccacatccgcatccacacaggccagaagcccttccagtgccgcatctgcatgcgcaacttcagccgcagcgaccacctcaccacccacatccgcacccacacaggcgaaaagcccttcgcctgcgacatctgtggaagaaagtttgccaggagcgatgaacgcaagaggcataccaagatccacttgcggcagaaggacaagaaagcagacaaaagtgttgtggcctcttcggccacctcctctctctcttcctacccgtccccggttgctacctcttacccgtccccggttactacctcttatccatccccggccaccacctcatacccatcccctgtgcccacctccttctcctctcccggctcctcgacctacccatcccctgtgcacagtggcttcccctccccgtcggtggccaccacgtactcctctgttccccctgctttcccggcccaggtcagcagcttcccttcctcagctgtcaccaactccttcagcgcctccacagggctttcggacatgacagcaaccttttctcccaggacaattgaaatttgctaaagggaaaggggaaagaaagggaaaagggagaaaaagaaacacaagagacttaaaggacaggaggaggagatggccataggagaggagggttcctcttaggtcagatggaggttctcagagccaagtcctccctctctactggagtggaaggtctattggccaacaatcctttctgcccacttccccttccccaattactattccctttgacttcagctgcctgaaacagccatgtccaagttcttcacctctatccaaagaacttgatttgcatggattttggataaatcatttcagtatcatctccatcatatgcctgaccccttgctcccttcaatgctagaaaatcgagttggcaaaatggggtttgggcccctcagagccctgccctgcacccttgtacagtgtctgtgccatggatttcgtttttcttggggtactcttgatgtgaagataatttgcatattctattgtattatttggagttaggtcctcacttgggggaaaaaaaaaaaaaagaaaagccaagcaaaccaatggtgatcctctattttgtgatgatgctgtgacaataagtttgaacccttttttttgaaacagcagtcccagtattctcagagcatgtgtcagagtgttgttccgttaacctttttgtaaatactgcttgaccgtactctcacatgtggcaaaatatggtttggtttttctttttttttttttttgaaagtgttttttcttcgtccttttggtttaaaaagtttcacgtcttggtgccttttgtgtgatgcgccttgctgatggcttgacatgtgcaattgtgagggacatgctcacctctagccttaaggggggcagggagtgatgatttgggggaggctttgggagcaaaataaggaagagggctgagctgagcttcggttctccagaatgtaagaaaacaaaatctaaaacaaaatctgaactctcaaaagtctatttttttaactgaaaatgtaaatttataaatatattcaggagttggaatgttgtagttacctactgagtaggcggcgatttttgtatgttatgaacatgcagttcattattttgtggttctattttactttgtacttgtgtttgcttaaacaaagtgactgtttggcttataaacacattgaatgcgctttattgcccatgggatatgtggtgtatatccttccaaaaaattaaaacgaaaataaagta

SEQ ID NO: 6152 - protein, 543 aa, Homo sapien; identical to SEQ ID NO: 4937

SEQ ID NO: 6153 - DNA, 2274 bp, Homo sapien
gcgccgccgtcgccaccgccaccgccaccgccactaccaccgtctgagtctgcagtcccgagatcccagccatcatgtccatagagaagatctgggcccgggagatcctggactcccgcgggaaccccacagtggaggtggatctctatactgccaaaggtcttttccgggctgcagtgcccagtggagcctctacgggcatctatgaggccctggagctgagggatggagacaaacagcgttacttaggcaaaggtgtcctgaaggcagtggaccacatcaactccaccatcgcgccagccctcatcagctcaggtctctctgtggtggagcaagagaaactggacaacctgatgctggagttggatgggactgagaacaaatccaagtttggggccaatgccatcctgggtgtgtctctggccgtgtgtaaggcaggggcagctgagcgggaactgcccctgtatcgccacattgctcagctggccgggaactcagacctcatcctgcctgtgccggccttcaacgtgatcaatggtggctctcatgctggcaacaagctggccatgcaggagttcatgatcctcccagtgggagctgagagctttcgggatgccatgcgactaggtgcagaggtctaccatacactcaagggagtcatcaaggacaaatacggcaaggatgccaccaatgtgggggatgaaggtggctttgcccccaatatcctggagaacagtgaagccttggagctggtgaaggaagccatcgacaaggctggctacacggaaaagatcgttattggcatggatgttgctgcctcagagttttatcgtgatggcaaatatgacttggacttcaagtctcccactgatccttcccgatacatcactggggaccagctgggggcactctaccaggactttgtcagggactatcctgtggtctccattgaggacccatttgaccaggatgattgggctgcctggtccaagttcacagccaatgtagggatccagattgtgggtgatgacctgacagtgaccaacccaaaacgtattgagcgggcagtggaagaaaaggcctgcaactgtctgctgctcaaggtcaaccagatcggctcggtcactgaagccatccaagcgtgcaagctggcccaggagaatggctggggggtcatggtgagtcatcgctcaggagagactgaggacacattcattgctgacctggtggtggggctgtgcacaggccagatcaagactggtgccccgtgccgttctgaacgtctggctaaatacaaccagctcatgagaattgaggaagagctgggggatgaagctcgctttgccggacataacttccgtaatcccagtgtgctgtgattcctctgcttgcctggagacgtggaacctctgtctcatcctcctggaaccttgctgtcctgatctgtgatagttcaccccctgagatcccctgagccccagggtgcccagaacttccctgattgacctgctccgctgctccttggcttacctgacctcttgctgtctctgctcgccctcctttctgtgccctactcattggggttccgcactttccacttcttcctttctctttctctcttccctcagaaactagaaatgtgaatgaggattattataaaagggggtccgtggaagaatgatcagcatctgtgatgggagcgtcagggttggtgtgctgaggtgttagagagggaccatgtgtcacttgtgctttgctcttgtcccacgtgtcttccactttgcatatgagccgtgaactgtgcatagtgctgggatggaggggagtgttgggcatgtgatcacgcctggctaataaggctttagtgtatttatttatttatttattttatttgtttttcattcatcccattaatcatttccccataactcaatggcctaaaactggcctgacttgggggaacgatgtgtctgtatttcatgtggctgtagatcccaagatgactggggtgggaggtcttgctagaatgggaagggtcatagaaagggccttgacatcagttcctttgtgtgtactcactgaagcctgcgttggtccagagcggaggctgtgtgcctgggggagttttcctctatacatctctccccaaccctaggttccctgttcttcctccagctgcaccagagcaacctctcactccccatgccacgttccacagttgccaccacctctgtggcattgaaatgagcacctccattaaagtctgaatcagtg

SEQ ID NO: 6154 - protein, 434 aa, Homo sapien; identical to SEQ ID NO: 396

SEQ ID NO: 6155 - DNA, 3479 bp, Homo sapien
ggcacgaggccgccccagacacagcgctcgccgagggtcgcttggaccctgatcttacccgtgggcaccctgcgctctgcctgccgcgaagaccggctccccgacccgcagaagtcaggagagagggtgaagcggagcagcccgaggcggggcagcctcccggagcagcgccgcgcagagcccgggacaatggggccgcggcggctgctgctggtggccgcctgcttcagtctgtgcggcccgctgttgtctgcccgcacccgggcccgcaggccagaatcaaaagcaacaaatgccaccttagatccccggtcatttcttctcaggaaccccaatgataaatatgaaccattttgggaggatgaggagaaaaatgaaagtgggttaactgaatacagattagtctccatcaataaaagcagtcctcttcaaaaacaacttcctgcattcatctcagaagatgcctccggatatttgaccagctcctggctgacactctttgtcccatctgtgtacaccggagtgtttgtagtcagcctcccactaaacatcatggccatcgttgtgttcatcctgaaaatgaaggtcaagaagccggcggtggtgtacatgctgcacctggccacggcagatgtgctgtttgtgtctgtgctcccctttaagatcagctattacttttccggcagtgattggcagtttgggtctgaattgtgtcgcttcgtcactgcagcattttactgtaacatgtacgcctctatcttgctcatgacagtcataagcattgaccggtttctggctgtggtgtatcccatgcagtccctctcctggcgtactctgggaagggcttccttcacttgtctggccatctgggctttggccatcgcaggggtagtgcctctgctcctcaaggagcaaaccatccaggtgcccgggctcaacatcactacctgtcatgatgtgctcaatgaaaccctgctcgaaggctactatgcctactacttctcagccttctctgctgtcttcttttttgtgccgctgatcatttccacggtctgttatgtgtctatcattcgatgtcttagctcttccgcagttgccaaccgcagcaagaagtcccgggctttgttcctgtcagctgctgttttctgcatcttcatcatttgcttcggacccacaaacgtcctcctgattgtgcattactcattcctttctcacacttccaccacagaggctgcctactttgcctacctcctctgtgtctgtgtcagcagcataagctgctgcatcgaccccctaatttactattacgcttcctctgagtgccagaggtacgtctacagtatcttatgctgcaaagaaagttccgatcccagcagttataacagcagtgggcagttgatggcaagtaaaatggatacctgctctagtaacctgaataacagcatatacaaaaagctgttaacttaggaaaagggactgctgggaggttaaaaagaaaagtttataaaagtgaataacctgaggattctattagtccccacccaaactttattgattcacctcctaaaacaacagatgtacgacttgcatacctgctttttatgggagctgtcaagcatgtatttttgtcaattaccagaaagataacaggacgagatgacggtgttattccaagggaatattgccaatgctacagtaataaatgaatgtcacttctggatatagctaggtgacatatacatacttacatgtgtgtatatgtagatgtatgcacacacatatattatttgcagtgcagtatagaataggcactttaaaacactctttccccgcaccccagcaattatgaaaataatctctgattccctgatttaatatgcaaagtctaggttggtagagtttagccctgaacatttcatggtgttcatcaacagtgagagactccatagtttgggcttgtaccacttttgcaaataagtgtattttgaaattgtttgacggcaaggtttaagttattaagaggtaagacttagtactatctgtgcgtagaagttctagtgttttcaattttaaacatatccaagtttgaattcctaaaattatggaaacagatgaaaagcctctgttttgatatgggtagtattttttacattttacacactgtacacataagccaaaactgagcataagtcctctagtgaatgtaggctggctttcagagtaggctattcctgagagctgcatgtgtccgcccccgatggaggactccaggcagcagacacatgccagggccatgtcagacacagattggccagaaaccttcctgctgagcctcacagcagtgagactggggccactacatttgctccatcctcctgggattggctgtgaactgatcatgtttatgagaaactggcaaagcagaatgtgatatcctaggaggtaatgaccatgaaagacttctctacccatcttaaaaacaacgaaagaaggcatggacttctggatgcccatccactgggtgtaaacacatctagtagttgttctgaaatgtcagttctgatatggaagcacccattatgcgctgtggccactccaataggtgctgagtgtacagagtggaataagacagagacctgccctcaagagcaaagtagatcatgcatagagtgtgatgtatgtgtaataaatatgtttcacacaaacaaggcctgtcagctaaagaagtttgaacatttgggttactatttcttgtggttataacttaatgaaaacaatgcagtacaggacatatattttttaaaataagtctgatttaattgggcactatttatttacaaatgttttgctcaatagattgctcaaatcaggttttcttttaagaatcaatcatgtcagtctgcttagaaataacagaagaaaatagaattgacattgaaatctaggaaaattattctataatttccatttacttaagacttaatgagactttaaaagcattttttaacctcctaagtatcaagtatagaaaatcttcatggaattcacaaagtaatttggaaattaggttgaaacatatctcttatcttacgaaaaaatggtagcattttaaacaaaatagaaagttgcaaggcaaatgtttatttaaaagagcaggccaggcgcggtggctcacgcctgtaatcccagcactttgggaggctgaggcgggtggatcacgaggtcaggagatcgagaccatcctggctaacacggtgaaacccgtctctactaaaaatgcaaaaaaaattagccgggcgtggtggcaggcacctgtagtcccagctactcgggaggctgaggcaggagactggcgtgaacccaggaggcggaccttgtagtgagccgagatcgcgccactgtgctccagcctgggcaacagagcaagactccatctcaaaaaataaaaataaataaaaaataaaaaaaaaaaaaaaaaa

SEQ ID NO: 6156 - protein, 425 aa, Homo sapien
MGPRRLLLVAACFSLCGPLLSARTRARRPESKATNATLDPRSFLLRNPNDKYEPFWEDEEKNESGLTEYRLVSINKSSPLQKQLPAFISEDASGYLTSSWLTLFVPSVYTGVFVVSLPLNIMAIVVFILKMKVKKPAVVYMLHLATADVLFVSVLPFKISYYFSGSDWQFGSELCRFVTAAFYCNMYASILLMTVISIDRFLAVVYPMQSLSWRTLGRASFTCLAIWALAIAGVVPLLLKEQTIQVPGLNITTCHDVLNETLLEGYYAYYFSAFSAVFFFVPLIISTVCYVSIIRCLSSSAVANRSKKSRALFLSAAVFCIFIICFGPTNVLLIVHYSFLSHTSTTEAAYFAYLLCVCVSSISCCIDPLIYYYASSECQRYVYSILCCKESSDPSSYNSSGQLMASKMDTCSSNLNNSIYKKLLT

SEQ ID NO: 6157 - DNA, 1194 bp, Homo sapien
ctgagtggagccaccatggcccgggggctcgctgtcctgctagtcttgttcctgcatatcaagaacctgcctgcccaggctgcggacacatgtccagaggtgaaggtggtgggcctggagggctctgacaagctcaccattctccgaggctgcccggggctgcccggggccccagggccaaagggagaggcaggtgtcattggagagagaggagaacgcggtctccctggagcccctggaaaggcaggaccagtggggcccaaaggagaccgaggagagaaggggatgcgtggagagaaaggagacgctgggcagtctcagtcgtgtgcgacaggcccacgcaactgcaaggacctgctagaccgggggtatttcctgagcggctggcacaccatctacctgcccgactgccggcccctgactgtgctctgtgacatggacacggacggagggggctggaccgttttccagcggaggatggatggctctgtggacttctatcgggactgggccgcatacaagcagggcttcggcagtcagctgggggagttctggctggggaacgacaacatccacgccctgactgcccagggaagcagcgagctccgtgtagacctggtggactttgagggcaaccaccagtttgctaagtacaaatcattcaaggtggctgacgaggcagagaagtacaagctggtactgggagcctttgtcgggggcagtgcgggtaattctctaacgggccacaacaacaacttcttctccaccaaagaccaagacaatgatgtgagttcttcgaattgtgctgagaagttccagggagcctggtggtacgccgactgtcatgcttcaaacctcaatggtctctacctcatgggaccccatgagagctatgccaatggtatcaactggagtgcggcgaaggggtacaaatatagctacaaggtgtcagagatgaaggtgcggcccgcctagacgggccaggacccctccacatgcacctgctagtggggaggccacacccacaagcgctgcgtcgtggaagtcaccccatttccccagccagacacactcccatgacgcccacagctgcccctttgcccccagctcagtcaagccgccacatgcccacaacctcaccagagggagaattatgtttctaaatatgtttactttgggacagaaaaaaaaaaa

SEQ ID NO: 6158 - protein, 319 aa, Homo sapien
MARGLAVLLVLFLHIKNLPAQAADTCPEVKVVGLEGSDKLTILRGCPGLPGAPGPKGEAGVIGERGERGLPGAPGKAGPVGPKGDRGEKGMRGEKGDAGQSQSCATGPRNCKDLLDRGYFLSGWHTIYLPDCRPLTVLCDMDTDGGGWTVFQRRMDGSVDFYRDWAAYKQGFGSQLGEFWLGNDNIHALTAQGSSELRVDLVDFEGNHQFAKYKSFKVADEAEKYKLVLGAFVGGSAGNSLTGHNNNFFSTKDQDNDVSSSNCAEKFQGAWWYADCHASNLNGLYLMGPHESYANGINWSAAKGYKYSYKVSEMKVRPA

SEQ ID NO: 6159 - DNA, 2957 bp, Homo sapien; identical to SEQ ID NO: 1310

SEQ ID NO: 6160 - protein, 452 aa, Homo sapien; identical to SEQ ID NO: 1311

SEQ ID NO: 6161 - DNA, 2272 bp, Homo sapien; identical to SEQ ID NO: 755

SEQ ID NO: 6162 - protein, 332 aa, Homo sapien; identical to SEQ ID NO: 756

SEQ ID NO: 6163 - DNA, 817 bp, Homo sapien
gaaccgtttactcgctgctgtgcccatctatcagcaggctccgggctgaagattgcttctcttctctcctccaaggtctagtgacggagcccgcgcgcggcgccaccatgcggcagaaggcggtatcgcttttcttgtgctacctgctgctcttcacttgcagtggggtggaggcaggtaagaaaaagtgctcggagagctcggacagcggctccgggttctggaaggccctgaccttcatggccgtcggaggaggactcgcagtcgccgggctgcccgcgctgggcttcaccggcgccggcatcgcggccaactcggtggctgcctcgctgatgagctggtctgcgatcctgaatgggggcggcgtgcccgccggggggctagtggccacgctgcagagcctcggggctggtggcagcagcgtcgtcataggtaatattggtgccctgatgggctacgccacccacaagtatctcgatagtgaggaggatgaggagtagccagcagctcccagaacctcttcttccttcttggcctaactcttccagttaggatctagaactttgcctttttttttttttttttttttttttgagatgggttctcactatattgtccaggctagagtgcagtggctattcacagatgcgaacatagtacactgcagcctccaactcctagcctcaagtgatcctcctgtctcaacctcccaagtaggattacaagcatgcgccgacgatgcccagaatccagaactttgtctatcactctccccaacaacctagatgtgaaaacagaataaacttcacccagaaaa

SEQ ID NO: 6164 - protein, 130 aa, Homo sapien
MRQKAVSLFLCYLLLFTCSGVEAGKKKCSESSDSGSGFWKALTFMAVGGGLAVAGLPALGFTGAGIAANSVAASLMSWSAILNGGGVPAGGLVATLQSLGAGGSSVVIGNIGALMGYATHKYLDSEEDEE

SEQ ID NO: 6165 - DNA, 2185 bp, Homo sapien
ggcacgaggggagtcagtgatttgaacgaagtactttcagtttcatattactctaaatccattacaaatctgcttagcttctaaatatttcatcaatgaggaaatcccagccctacaacttcggaacagtgaaatattagtccagggatccagtgagagacacagaagtgctagaagccagtgctcgtgaactaaggagaaaaagaacagacaagggaacagcctggacatggcatcagagatccacatgacaggcccaatgtgcctcattgagaacactaatgggcgactgatggcgaatccagaagctctgaagatcctttctgccattacacagcctatggtggtggtggcaattgtgggcctctaccgcacaggcaaatcctacctgatgaacaagctggctggaaagaaaaagggcttctctctgggctccacggtgcagtctcacactaaaggaatctggatgtggtgtgtgccccaccccaagaagccaggccacatcctagttctgctggacaccgagggtctgggagatgtagagaagggtgacaaccagaatgactcctggatcttcgccctggccgtcctcctgagcagcaccttcgtgtacaatagcataggaaccatcaaccagcaggctatggaccaactgtactatgtgacagagctgacacatagaatccgatcaaaatcctcacctgatgagaatgagaatgaggttgaggattcagctgactttgtgagcttcttcccagactttgtgtggacactgagagatttctccctggacttggaagcagatggacaacccctcacaccagatgagtacctgacatactccctgaagctgaagaaaggtaccagtcaaaaagatgaaacttttaacctgcccagactctgtatccggaaattcttcccaaagaaaaaatgctttgtctttgatcggcccgttcaccgcaggaagcttgcccagctcgagaaactacaagatgaagagctggaccccgaatttgtgcaacaagtagcagacttctgttcctacatctttagtaattccaaaactaaaactctttcaggaggcatccaggtcaacgggcctcgtctagagagcctggtgctgacctacgtcaatgccatcagcagtggggatctgccgtgcatggagaacgcagtcctggccttggcccagatagagaactcagctgcagtgcaaaaggctattgcccactatgaacagcagatgggccagaaggtgcagctgcccacagaaagcctccaggagctgctggacctgcacagggacagtgagagagaggccattgaagtcttcatcaggagttccttcaaagatgtggaccatctatttcaaaaggagttagcggcccagctagaaaaaaagcgggatgacttttgtaaacagaatcaggaagcatcatcagatcgttgctcaggtttacttcaggtcattttcagtcctctagaagaagaagtgaaggcgggaatttattcgaaaccagggggctatcgtctctttgttcagaagctacaagacctgaagaaaaagtactatgaggaaccgaggaaggggatacaggctgaagagattctgcagacatacttgaaatccaaggagtctatgactgatgcaattctccagacagaccagactctcacagaaaaagaaaaggagattgaagtggaacgtgtgaaagctgagtctgcacaggcttcagcaaaaatgttgcaggaaatgcaaagaaagaatgagcagatgatggaacagaaggagaggagttatcaggaacacttgaaacaactgactgagaagatggagaacgacagggtccagttgctgaaagagcaagagaggaccctcgctcttaaacttcaggaacaggagcaactactaaaagagggatttcaaaaagaaagcagaataatgaaaaatgagatacaggatctccagacgaaaatgagacgacgaaaggcatgtaccataagctaaagaccagagccttcctgtcacccctaaccaaggcataattgaaacaattttagaatttggaacaagcgtcactacatttgataataattagatcttgcatcataacaccaaaagtttataaaggcatgtggtacaatgatcaaaatcatgttttttcttaaaaaaaaaaaaaaaaaa

SEQ ID NO: 6166 - protein, 592 aa, Homo sapien; identical to SEQ ID NO: 710

SEQ ID NO: 6167 - DNA, 1040 bp, Homo sapien; identical to SEQ ID NO: 1796

SEQ ID NO: 6168 - protein, 264 aa, Homo sapien; identical to SEQ ID NO: 1797

SEQ ID NO: 6169 - DNA, 1824 bp, Homo sapien; identical to SEQ ID NO: 1496

SEQ ID NO: 6170 - protein, 547 aa, Homo sapien; identical to SEQ ID NO: 1497

SEQ ID NO: 6171 - DNA, 360 bp, Homo sapien
atgaaggcgctgagcccggtgcgcggctgctacgaggcggtgtgctgcctgtcggaacgcagtctggccatcgcccggggccgagggaagggcccggcagctgaggagccgctgagcttgctggacgacatgaaccactgctactcccgcctgcgggaactggtacccggagtcccgagaggcactcagcttagccaggtggaaatcctacagcgcgtcatcgactacattctcgacctgcaggtagtcctggccgagccagcccctggaccccctgatggcccccaccttcccatccagacagccgagctcgctccggaacttgtcatctccaacgacaaaaggagcttttgccactga

SEQ ID NO: 6172 - protein, 119 aa, Homo sapien
MKALSPVRGCYEAVCCLSERSLAIARGRGKGPAAEEPLSLLDDMNHCYSRLRELVPGVPRGTQLSQVEILQRVIDYILDLQVVLAEPAPGPPDGPHLPIQTAELAPELVISNDKRSFCH

SEQ ID NO: 6173 - DNA, 1658 bp, Homo sapien; identical to SEQ ID NO: 1682

SEQ ID NO: 6174 - protein, 459 aa, Homo sapien [sequence omitted]

SEQ ID NO: 6175 - DNA, 1283 bp, Homo sapien
aagccacccagcctatgcatccgctcctcaatcctctcctgttggcactgggcctcatggcgcttttgttgaccacggtcattgctctcacttgccttggcggctttgcctccccaggccctgtgcctccctctacagccctcagggagctcattgaggagctggtcaacatcacccagaaccagaaggctccgctctgcaatggcagcatggtatggagcatcaacctgacagctggcatgtactgtgcagccctggaatccctgatcaacgtgtcaggctgcagtgccatcgagaagacccagaggatgctgagcggattctgcccgcacaaggtctcagctgggcagttttccagcttgcatgtccgagacaccaaaatcgaggtggcccagtttgtaaaggacctgctcttacatttaaagaaactttttcgcgagggacggttcaactgaaacttcgaaagcatcattatttgcagagacaggacctgactattgaagttgcagattcatttttctttctgatgtcaaaaatgtcttgggtaggcgggaaggagggttagggaggggtaaaattccttagcttagacctcagcctgtgctgcccgtcttcagcctagccgacctcagccttccccttgcccagggctcagcctggtgggcctcctctgtccagggccctgagctcggtggacccagggatgacatgtccctacacccctcccctgccctagagcacactgtagcattacagtgggtgccccccttgccagacatgtggtgggacagggacccacttcacacacaggcaactgaggcagacagcagctcaggcacacttcttcttggtcttatttattattgtgtgttatttaaatgagtgtgtttgtcaccgttggggattggggaagactgtggctgctggcacttggagccaagggttcagagactcagggccccagcactaaagcagtggaccccaggagtccctggtaataagtactgtgtacagaattctgctacctcactggggtcctggggcctcggagcctcatccgaggcagggtcaggagaggggcagaacagccgctcctgtctgccagccagcagccagctctcagccaacgagtaatttattgtttttcctcgtatttaaatattaaatatgttagcaaagagttaatatatagaagggtaccttgaacactgggggaggggacattgaacaagttgtttcattgactatcaaactgaagccagaaataaagttggtgacagata

SEQ ID NO: 6176 - protein, 132 aa, Homo sapien
MALLLTTVIALTCLGGFASPGPVPPSTALRELIEELVNITQNQKAPLCNGSMVWSINLTAGMYCAALESLINVSGCSAIEKTQRMLSGFCPHKVSAGQFSSLHVRDTKIEVAQFVKDLLLHLKKLFREGRFN

SEQ ID NO: 6177 - DNA, 1610 bp, Homo sapien; identical to SEQ ID NO: 1870

SEQ ID NO: 6178 - protein, 267 aa, Homo sapien; identical to SEQ ID NO: 1871

SEQ ID NO: 6179 - DNA, 2223 bp, Homo sapien
tctccttgttttgctttcgatctggactgttctcaggcaagccggggagtaacttttagttttgctcctgcgattattcaactgacgggctttcatttccatttcacacaccctagcaacacttataccttgcggaattgtattggtagcgtgaaaaaagcacactgagagggcaccatgccggtggaaaggatgcgcatgcgcccgtggctggaggagcagataaactccaacacgatcccggggctcaagtggcttaacaaggaaaagaagatttttcagatcccctggatgcatgcggctagacatgggtgggatgtggaaaaagatgcaccactctttagaaaccgggcaatccatacaggaaagcatcaaccaggagtagataaacctgatcccaaaacatggaaggcgaatttcagatgcgccatgaattccttgcctgatattgaagaagtcaaggataaaagcataaagaaaggaaataatgccttcagggtctaccgaatgctgcccctatcagaacggccttctaagaaaggaaagaaaccaaagacagaaaaagaagacaaagttaagcacatcaagcaagaaccagttgagtcatctctggggcttagtaatggagtaagtgatctttctcctgagtatgcggtcctgacttcaactataaaaaatgaagtggatagtacggtgaacatcatagttgtaggacagtcccatctggacagcaacattgagaatcaagagattgtcaccaatccgccagacatttgccaagttgtagaggtgaccactgagagcgacgagcagccggtcagcatgagcgagctctaccctctgcagatctcccccgtgtcttcctatgcagaaagcgaaacgactgatagtgtgcccagcgatgaagagagtgccgaggggcggccacactggcggaagaggaatattgaaggcaaacagtacctcagcaacatggggactcgaggctcctacctgctgcccggcatggcgtccttcgtcacttccaacaaaccggacctccaggtcaccatcaaagaggagagcaatccggtgccttacaacagctcctggcccccttttcaagacctccccctttcttcctccatgaccccagcatccagcagcagtcggccagaccgggagacccgggccagcgtcatcaagaaaacatcggatatcacccaggcccgcgtcaagagctgttaagcctctgactctccgcggtggttgttggggcttcttggctttgttttgttgtttgtttgtattttatttttttctctctgacacctattttagacaaatctaagggaaaaagccttgacaatagaacattgattgctgtgtccaactccagtacctggagcttctctttaactcaggactccagcccattggtagacgtgtgtttctagagcctgctggatctcccagggctactcactcaagttcaaggaccaacaagggcagtggaggtgctgcattgcctgcggtcaaggccagcaaggtggagtggatgcctcagaacggacgagataatgtgaactagctggaattttttattcttgtgaatatgtacataggcagcactagcgacattgcagtctgcttctgcaccttatcttaaagcacttacagataggccttcttgtgatcttgctctatctcacagcacactcagcacccccttctctgcccattccccagcctctcttcctatcccatcccatcccatcccatcccatcccatcccatcccgctcttttcctacttttccttccctcaaagcttccattccacatccggaggagaagaaggaaatgaatttctctacagatgtcccattttcagactgctttaaaaaaaatccttctaatctgctatgcttgaatgccacgcggtacaaaggaaaaagtatcatggaaatattatgcaaattcccagatttgaagacaaaaatactctaattctaaccagagcaagcttttttattttttatacaggggaatattttattcaaggtaaaattctaaataaaatataattgttttttatcttttctacagcaaatttataattttaagattccttttcttgtttatcagcagttgttattacatccttgtggcacatttttttttaattttgtaaaggtgaaaaaagcttttatgagctcatctagcaatcagattttcctgtgga

SEQ ID NO: 6180 - protein, 349 aa, Homo sapien
MPVERMRMRPWLEEQINSNTIPGLKWLNKEKKIFQIPWMHAARHGWDVEKDAPLFRNRAIHTGKHQPGVDKPDPKTWKANFRCAMNSLPDIEEVKDKSIKKGNNAFRVYRMLPLSERPSKKGKKPKTEKEDKVKHIKQEPVESSLGLSNGVSDLSPEYAVLTSTIKNEVDSTVNIIVVGQSHLDSNIENQEIVTNPPDICQVVEVTTESDEQPVSMSELYPLQISPVSSYAESETTDSVPSDEESAEGRPHWRKRNIEGKQYLSNMGTRGSYLLPGMASFVTSNKPDLQVTIKEESNPVPYNSSWPPFQDLPLSSSMTPASSSSRPDRETRASVIKKTSDITQARVKSC

SEQ ID NO: 6181 - DNA, 3614 bp, Homo sapien
gtccgccaaaacctgcgcggatagggaagaacagcaccccggcgccgattgccgtaccaaacaagcctaacgtccgctgggccccggacgccgcgcggaaaagatgaatttacaaccaattttctggattggactgatcagttcagtttgctgtgtgtttgctcaaacagatgaaaatagatgtttaaaagcaaatgccaaatcatgtggagaatgtatacaagcagggccaaattgtgggtggtgcacaaattcaacatttttacaggaaggaatgcctacttctgcacgatgtgatgatttagaagccttaaaaaagaagggttgccctccagatgacatagaaaatcccagaggctccaaagatataaagaaaaataaaaatgtaaccaaccgtagcaaaggaacagcagagaagctcaagccagaggatattcatcagatccaaccacagcagttggttttgcgattaagatcaggggagccacagacatttacattaaaattcaagagagctgaagactatcccattgacctctactaccttatggacctgtcttattcaatgaaagacgatttggagaatgtaaaaagtcttggaacagatctgatgaatgaaatgaggaggattacttcggacttcagaattggatttggctcatttgtggaaaagactgtgatgccttacattagcacaacaccagctaagctcaggaacccttgcacaagtgaacagaactgcaccaccccatttagctacaaaaatgtgctcagtcttactaataaaggagaagtatttaatgaacttgttggaaaacagcgcatatctggaaatttggattctccagaaggtggtttcgatgccatcatgcaagttgcagtttgtggatcactgattggctggaggaatgttacacggctgctggtgttttccacagatgccgggtttcactttgctggagatgggaaacttggtggcattgttttaccaaatgatggacaatgtcacctggaaaataatatgtacacaatgagccattattatgattatccttctattgctcaccttgtccagaaactgagtgaaaataatattcagacaatttttgcagttactgaagaatttcagcctgtttacaaggagctgaaaaacttgatccctaagtcagcagtaggaacattatctgcaaattctagcaatgtaattcagttgatcattgatgcatacaattccctttcctcagaagtcattttggaaaacggcaaattgtcagaaggagtaacaataagttacaaatcttactgcaagaacggggtgaatggaacaggggaaaatggaagaaaatgttccaatatttccattggagatgaggttcaatttgaaattagcataacttcaaataagtgtccaaaaaaggattctgacagctttaaaattaggcctctgggctttacggaggaagtagaggttattcttcagtacatctgtgaatgtgaatgccaaagcgaaggcatccctgaaagtcccaagtgtcatgaaggaaatgggacatttgagtgtggcgcgtgcaggtgcaatgaagggcgtgttggtagacattgtgaatgcagcacagatgaagttaacagtgaagacatggatgcttactgcaggaaagaaaacagttcagaaatctgcagtaacaatggagagtgcgtctgcggacagtgtgtttgtaggaagagggataatacaaatgaaatttattctggcaaattctgcgagtgtgataatttcaactgtgatagatccaatggcttaatttgtggaggaaatggtgtttgcaagtgtcgtgtgtgtgagtgcaaccccaactacactggcagtgcatgtgactgttctttggatactagtacttgtgaagccagcaacggacagatctgcaatggccggggcatctgcgagtgtggtgtctgtaagtgtacagatccgaagtttcaagggcaaacgtgtgagatgtgtcagacctgccttggtgtctgtgctgagcataaagaatgtgttcagtgcagagccttcaataaaggagaaaagaaagacacatgcacacaggaatgttcctattttaacattaccaaggtagaaagtcgggacaaattaccccagccggtccaacctgatcctgtgtcccattgtaaggagaaggatgttgacgactgttggttctattttacgtattcagtgaatgggaacaacgaggtcatggttcatgttgtggagaatccagagtgtcccactggtccagacatcattccaattgtagctggtgtggttgctggaattgttcttattggccttgcattactgctgatatggaagcttttaatgataattcatgacagaagggagtttgctaaatttgaaaaggagaaaatgaatgccaaatgggacacgggtgaaaatcctatttataagagtgccgtaacaactgtggtcaatccgaagtatgagggaaaatgagtactgcccgtgcaaatcccacaacactgaatgcaaagtagcaatttccatagtcacagttaggtagctttagggcaatattgccatggttttactcatgtgcaggttttgaaaatgtacaatatgtataatttttaaaatgttttattattttgaaaataatgttgtaattcatgccagggactgacaaaagacttgagacaggatggttattcttgtcagctaaggtcacattgtgcctttttgaccttttcttcctggactattgaaatcaagcttattggattaagtgatatttctatagcgattgaaagggcaatagttaaagtaatgagcatgatgagagtttctgttaatcatgtattaaaactgatttttagctttacatatgtcagtttgcagttatgcagaatccaaagtaaatgtcctgctagctagttaaggattgttttaaatctgttattttgctatttgcctgttagacatgactgatgacatatctgaaagacaagtatgttgagagttgctggtgtaaaatacgtttgaaatagttgatctacaaaggccatgggaaaaattcagagagttaggaaggaaaaaccaatagctttaaaacctgtgtgccattttaagagttacttaatgtttggtaacttttatgccttcactttacaaattcaagccttagataaaagaaccgagcaattttctgctaaaaagtccttgatttagcactatttacatacaggccatactttacaaagtatttgctgaatggggaccttttgagttgaatttattttattatttttattttgtttaatgtctggtgctttctatcacctcttctaatcttttaatgtatttgtttgcaattttggggtaagacttttttatgagtactttttctttgaagttttagcggtcaatttgcctttttaatgaacatgtgaagttatactgtggctatgcaacagctctcacctacgcgagtcttactttgagttagtgccataacagaccactgtatgtttacttctcaccatttgagttgcccatcttgtttcacactagtcacattcttgttttaagtgcctttagttttaacagttca

SEQ ID NO: 6182 - protein, 798 aa, Homo sapien [sequence omitted]

SEQ ID NO: 6183 - DNA, 2472 bp, Homo sapien
ctgccagggttgggtgcgccgctgaacggatggctgagggagccccgcggatcgttaggaaagccggccagctgatcgtcgtgtgttgccacccattcatgtcaagatgactaagtttggatttttgcgattgtcctatgagaagcaggacacacttttgaagcttctcattctgtcaatggctgctgtattatccttctccactcgtctgtttgctgtcctgagatttgaaagtgttatccatgagtttgatccgtactttaattatcggactaccaggttcctggctgaggaggggttttataaattccataactggtttgatgaccgagcctggtaccctttgggacgaatcattggaggaacaatttacccaggtttaatgatcacctctgctgcaatctaccatgtactccattttttccacatcaccatcgacattcggaatgtctgtgtgttcctggcccctctcttctcctccttcacctccatcgtcacgtacctccttaccaaagagctcaaggatgcaggggctgggcttcttgctgctgccatgattgctgtagttcctggatatatctcccgatctgtggctggctcctatgataatgaagggattgccatcttttgcatgctactcacctactacatgtggatcaaggcagtaaagactggttccatctgttgggcagctaagtgtgcccttgcttatttctacatggtctcgtcatggggaggttatgtgttcctgatcaacttaattcctctccacgtcctcgtgctgatgctcacaggccgtttctctcaccggatctatgtggcctactgtactgtttactgcctgggtactatactttctaggcagatctcctttgtgggtttccagcctgtcctttcatcagagcacatggcagggtttggggtctttggtctctgccagatccatgcctttgtggattacctgcgcagcaagttgaatccacaacaatttgaagttcttttccggagcgtcatctctctggtaggctttgtccttctcaccgtgggagctctcctcatgctgacaggaaaaatatctccctggacggggcgtttctactcactgctggatccctcttatgctaagaacaacatccccatcattgcttctgtgtctgagcatcagcccacaacctggtcctcatactattttgacctgcagctcctcgtcttcatgtttccagttggcctctattactgctttagcaacctgtctgatgcccggatttttatcatcatgtatggtgtgaccagcatgtacttttcagctgtaatggtgcgtctaatgctagtgttggcacctgttatgagcattctctctggcattggagtctcccaggtgctgtccacatacatgaagaatctggacataagtcgcccagacaagaagagcaagaagcaacaggattccacctaccctattaagattgaagtggcaagtgggatgatactggtcatggctttctttctcatcacctacacctttcattcaacctgggtgaccagtgaggcctactcttctccgtccattgtactatctgcccgtggtggggatggcagtaggatcatatttgatgacttccgagaagcatattattggcttcgtcataatactccagaggatgcgaaggtcatgtcctggtgggattatggctatcagattacagctatggcaaaccgaacaattttagtggacaataacacatggaataatacccatatttctcgagtagggcaggcaatggcgtccacagaggaaaaagcctatgagatcatgagggagctcgatgtcagctatgtgctggtcatttttggaggcctcactgggtattcctctgatgatatcaacaagtttctttggatggtccggattggagggagcacagatacaggcaaacatatcaaggagaatgactattatactccaactggggagttccgtgtggaccgtgaaggttctccagtgctgctcaactgcctcatgtacaagatgtgttactatcgctttggacaggtttacacagaagccaagcgtcctccaggctttgaccgtgtccgaaatgctgagattgggaataaagactttgagcttgatgtcctggaggaaggctataccacagaacattggctggtcaggatatacaaggtaaaggacctggataatcgaggcttgtcaaggacataaatgtcacgtccagctctgatatcttcgcactgagcacatcacatttaggacgttgaagattttttttttttttttttttttaatatgcagtttgtaagaacaaaactggatggcatccgaattgtctggaagttttgtcttgggcatgatgggctgggccaaatgaaatgatttttataattctaaacaggttaccaaatgaaatgtcatggctttactttggtcaattaaaggggggaattttttta

SEQ ID NO: 6184 - protein, 705 aa, Homo sapien
MTKFGFLRLSYEKQDTLLKLLILSMAAVLSFSTRLFAVLRFESVIHEFDPYFNYRTTRFLAEEGFYKFHNWFDDRAWYPLGRIIGGTIYPGLMITSAAIYHVLHFFHITIDIRNVCVFLAPLFSSFTSIVTYLLTKELKDAGAGLLAAAMIAVVPGYISRSVAGSYDNEGIAIFCMLLTYYMWIKAVKTGSICWAAKCALAYFYMVSSWGGYVFLINLIPLHVLVLMLTGRFSHRIYVAYCTVYCLGTILSRQISFVGFQPVLSSEHMAGFGVFGLCQIHAFVDYLRSKLNPQQFEVLFRSVISLVGFVLLTVGALLMLTGKISPWTGRFYSLLDPSYAKNNIPIIASVSEHQPTTWSSYYFDLQLLVFMFPVGLYYCFSNLSDARIFIIMYGVTSMYFSAVMVRLMLVLAPVMSILSGIGVSQVLSTYMKNLDISRPDKKSKKQQDSTYPIKIEVASGMILVMAFFLITYTFHSTWVTSEAYSSPSIVLSARGGDGSRIIFDDFREAYYWLRHNTPEDAKVMSWWDYGYQITAMANRTILVDNNTWNNTHISRVGQAMASTEEKAYEIMRELDVSYVLVIFGGLTGYSSDDINKFLWMVRIGGSTDTGKHIKENDYYTPTGEFRVDREGSPVLLNCLMYKMCYYRFGQVYTEAKRPPGFDRVRNAEIGNKDFELDVLEEGYTTEHWLVRIYKVKDLDNRGLSRT

SEQ ID NO: 6185 - DNA, 527 bp, Homo sapien
gccattgccattcccgtggacctggacagccaagtcaacaacctctttctcaagtcccacagcattgtgcagaaacagccatgaactggcggctctcagcccgaaatgccgcacgcagggactctgttctggcagcttccagagactaccggaatatcattgagagattgcaggacatcgtctccgcgctggaggaccgtctcaggcccctggtgcaggcagagttatctgtgctcgtggatgttctccacagacccgagctgcttttcccagagaacacagacgccagaaggaaatgtgaaagtggcggtttcatttgcaagttaataaagcatacaaaacagctgctagaagaaaatgaagagaagctctgcattaaggtcctacagaccctgagggaaatgatgaccaaagatagaggctatggagaaaagggtgaggcgctcaggcaagttctggtcaaccgttactatggaaacgtcagaccttcgggacgaagagagagccttaccagctttggcaatggc

SEQ ID NO: 6186 - protein, 174 aa, Homo sapien
HCHSRGPGQPSQQPLSQVPQHCAETAMNWRLSARNAARRDSVLAASRDYRNIIERLQDIVSALEDRLRPLVQAELSVLVDVLHRPELLFPENTDARRKCESGGFICKLIKHTKQLLEENEEKLCIKVLQTLREMMTKDRGYGEKGEALRQVLVNRYYGNVRPSGRRESLTSFGN

SEQ ID NO: 6187 - DNA, 1999 bp, Homo sapien
ggcacgagggcgaggcgggagtggaggtgcgcggagtcaggcagacagacagacacagccagccagccaggtcggcagtatagtccgaactgcaaatcttattttcttttcaccttctctctaactgcccagagctagcgcctgtggctcccgggctggtgtttcgggagtgtccagagagcctggtctccagccgcccccgggaggagagccctgctgcccaggcgctgttgacagcggcggaaagcagcggtacccacgcgcccgccgggggaagtcggcgagcggctgcagcagcaaagaactttcccggctgggaggaccggagacaagtggcagagtcccggagcgaacttttgcaagcctttcctgcgtcttaggcttctccacggcggtaaagaccagaaggcggcggagagccacgcaagagaagaaggacgtgcgctcagcttcgctcgcaccggttgttgaacttgggcgagcgcgagccgcggctgccgggcgccccctccccctagcagcggaggaggggacaagtcgtcggagtccgggcggccaagacccgccgccggccggccactgcagggtccgcactgatccgctccgcggggagagccgctgctctgggaagtgagttcgcctgcggactccgaggaaccgctgcgcccgaagagcgctcagtgagtgaccgcgacttttcaaagccgggtagcgcgcgcgagtcgacaagtaagagtgcgggaggcatcttaattaaccctgcgctccctggagcgagctggtgaggagggcgcagcggggacgacagccagcgggtgcgtgcgctcttagagaaactttccctgtcaaaggctccggggggcgcgggtgtcccccgcttgccagagccctgttgcggccccgaaacttgtgcgcgcagcccaaactaacctcacgtgaagtgacggactgttctatgactgcaaagatggaaacgaccttctatgacgatgccctcaacgcctcgttcctcccgtccgagagcggaccttatggctacagtaaccccaagatcctgaaacagagcatgaccctgaacctggccgacccagtggggagcctgaagccgcacctccgcgccaagaactcggacctcctcacctcgcccgacgtggggctgctcaagctggcgtcgcccgagctggagcgcctgataatccagtccagcaacgggcacatcaccaccacgccgacccccacccagttcctgtgccccaagaacgtgacagatgagcaggagggcttcgccgagggcttcgtgcgcgccctggccgaactgcacagccagaacacgctgcccagcgtcacgtcggcggcgcagccggtcaacggggcaggcatggtggctcccgcggtagcctcggtggcagggggcagcggcagcggcggcttcagcgccagcctgcacagcgagccgccggtctacgcaaacctcagcaacttcaacccaggcgcgctgagcagcggcggcggggcgccctcctacggcgcggccggcctggcctttcccgcgcaaccccagcagcagcagcagccgccgcaccacctgccccagcagatgcccgtgcagcacccgcggctgcaggccctgaaggaggagcctcagacagtgcccgagatgcccggcgagacaccgcccctgtcccccatcgacatggagtcccaggagcggatcaaggcggagaggaagcgcatgaggaaccgcatcgctgcctccaagtgccgaaaaaggaagctggagagaatcgcccggctggaggaaaaagtgaaaaccttgaaagctcagaactcggagctggcgtccacggccaacatgctcagggaacaggtggcacagcttaaacagaaagtcatgaaccacgttaacagtgggtgccaactcatgctaacgcagcagttgcaaacattttgaagagagaccgtcgggggctgaggggcaacgaaaaaaaaaaaaaaaaaa

SEQ ID NO: 6188 - protein, 331 aa, Homo sapien; identical to SEQ ID NO: 456

SEQ ID NO: 6189 - DNA, 1832 bp, Homo sapien
gagcggccaggccagcctcggagccagcagggagctgggagctgggggaaacgacgccaggaaagctatcgcgccagagagggcgacgggggctcgggaagcctgacagggcttttgcgcacagctgccggctggctgctacccgcccgcgccagcccccgagaacgcgcgaccaggcacccagtccggtcaccgcagcggagagctcgccgctcgctgcagcgaggcccggagcggccccgcagggaccctccccagaccgcctgggccgcccggatgtgcactaaaatggaacagcccttctaccacgacgactcatacacagctacgggatacggccgggcccctggtggcctctctctacacgactacaaactcctgaaaccgagcctggcggtcaacctggccgacccctaccggagtctcaaagcgcctggggctcgcggacccggcccagagggcggcggtggcggcagctacttttctggtcagggctcggacaccggcgcgtctctcaagctcgcctcttcggagctggaacgcctgattgtccccaacagcaacggcgtgatcacgacgacgcctacacccccgggacagtacttttacccccgcgggggtggcagcggtggaggtgcagggggcgcagggggcggcgtcaccgaggagcaggagggcttcgccgacggctttgtcaaagccctggacgatctgcacaagatgaaccacgtgacaccccccaacgtgtccctgggcgctaccggggggcccccggctgggcccgggggcgtctacgccggcccggagccacctcccgtttacaccaacctcagcagctactccccagcctctgcgtcctcgggaggcgccggggctgccgtcgggaccgggagctcgtacccgacgaccaccatcagctacctcccacacgcgccgcccttcgccggtggccacccggcgcagctgggcttgggccgcggcgcctccaccttcaaggaggaaccgcagaccgtgccggaggcgcgcagccgggacgccacgccgccggtgtcccccatcaacatggaagaccaagagcgcatcaaagtggagcgcaagcggctgcggaaccggctggcggccaccaagtgccggaagcggaagctggagcgcatcgcgcgcctggaggacaaggtgaagacgctcaaggccgagaacgcggggctgtcgagtaccgccggcctcctccgggagcaggtggcccagctcaaacagaaggtcatgacccacgtcagcaacggctgtcagctgctgcttggggtcaagggacacgccttctgaacgtcccctgcccctttacggacaccccctcgcttggacggctgggcacacgcctcccactggggtccagggagcaggcggtgggcacccaccctgggacctaggggcgccgcaaaccacactggactccggccctcctaccctgcgcccagtccttccacctcgacgtttacaagcccccccttccacttttttttgtatgttttttttctgctggaaacagactcgattcatattgaatataatatatttgtgtatttaacagggaggggaagagggggcgatcgcggcggagctggccccgccgcctggtactcaagcccgcggggacattgggaaggggacccccgccccctgccctcccctctctgcaccgtactgtggaaaagaaacacgcacttagtctctaaagagtttattttaagacgtgtttgtgtttgtgtgtgtttgttctttttattgaatctatttaagtaaaaaaaaaattggttctttaaaaaaaaaaaaaaaaa

SEQ ID NO: 6190 - protein, 347 aa, Homo sapien; identical to SEQ ID NO: 464

SEQ ID NO: 6191 - DNA, 3647 bp, Homo sapien
gagtgggagaaggatggtcgccctccacagtgcaatggctgaccacatgagcactgaggacccagaggcctgcccctggctcagaacccagccttcctctcactcctccaatcctatccttcattcaagaggccaccctgagggtgtgaatgctatgcatcaaatttgggctcggacgtatgcgatttatgattctagctccaccactctgagctgggaccttggctctcctctctgagcctctttgcttgtctgctaactggggatggtcgtgcctaccgtctgtggctgttgggcgggttcaaggagggagtcggtggcacagcctcatgccacggtgcctgctgtgcccacagggtgtctgctgcacagccctgctggtggccgtggtggcccggaagctggagtttaacaaggcagagaagcacgtgcacaacttcatgatggatatccagtataccaaagaggtgagatgggcatatggcacccatgggacacccctcttccaagaagcaggagtccaggcgcccctgcttcccctaggacccaagagtcccagccctagccctgccttcccagaaccgtaagggtctatctccacggacactgtgccacccacccccagatgaaggagtccgctgcccgagtgctacaagaagcctggatgttctacaaacatactcgcaggaaggagtctcatgctgcccgcaggcatcagcgcaagctgctggccgccatcaacgcgtgagggccgctttgtatgcacacgtgtccatgtgcacccatgtccaagtcacctctctgcacggctgtgtgtgtgcatgtccatgcctgtccaggtcaggacacccaggtgtggtctcactcaacatccaggtctcacctggatctgaccgtgcatgactctatgtgtctgtgctggtttgtctccgcatatctcggtgtgtctgcgggacctgggtacctgggtttctactggggatgggggctcgtggggaggcagggtgcatcccctcccactctttcagctcttcgacaactttgtttctttgttttgtttcttcatgtgcctctcctcccttcattcctcccctgagctacagctacattcagggaccaggcttgtaaaactgactccccacttgttcccacaggttccgccaggtgcggctgaaacaccggaagctccgggaacaagtgaactccatggtggacatctccaaggtactaggatcccgtgggaggaggtcttgaagaagggggaggttggggccacagggagggaaatctggccctagaacagggaaccttggcaggggcctggcacacacagcctgtcagtaaaggtctgtggttgaatgaaggaaggaaggaatgaatgatgcaacacagagcttcttacattcatgaaaggcacagatcccttacaaactgaaaaaaaaaaaattgcacaaagaaccccagtgtttggtttcaaattatctttattgttaagttacttacatgtggacggatataaaattccttccaactacagctcatacaataaaaccaaagcaaatttacaaaccaagcccatagacggcaaaaccaatacaattaaaatgaacaacactgacaaggacacaggtgacattgtttccgtaaaactcaatctctgctgctcttgtggaggggtactcagggcaacagggacgtccatgcaagtttgcctggccaaggcgtgactcagctacccgcccccttcttctgctgagaccatttgatttcgccagtgcttaggacaatgatgtcacaacaccccttggcctgctcacaagcatcttctgcttatctggtggcctttgctttttctcggtagcccacgacagttcaaacaagtggccccttggcaacaatgccatggtaaagcccgtccagatccaggccccaaaaccgattggcaggtcttaatgcaagcaatggcccaaatttgcaggaattggcaggtggaaatttcttgaaggtttcaaaccaaaacccccgaattcaagaaatttcatagaaaatccacaaacctcaggatcaactagtgaatcctagccagagaatgcagtaaaagactatgtggatttggaagtcaggcatcatccatgctagaaatatttaatgagcacctgctatgttctaggtcttatttcaggagctgctttgggcatgtcatttaactgttccatgcctgtttcctcagctgtaagacaggaacaggattcccactccctgtggcttttgggaggattttaaaccatatagggaaacacctgggcaggtagctgggaagtggtaggtggtcaatacatggtaacgttattgtcgagggtaatcctcagaggaccataaggatgtggtcaatattggttccattgccttacgctatggagtaggtgggggtcgaccccagccccgacacctctgatcctctcctcccacccagatgcacatgatcctgtatgacctgcagcagaatctgagcagctcacaccgggccctggagaaacagattgacacgctggcggggaagctggatgccctgactgagctgcttagcactgccctggggccgaggcagcttccagaacccagccagcagtccaagtagctggtgagggggctgggacttgggcaggaaggcatcctggaggaagggttcctgtggccagcaccctatgtggctaaggggcgggggatggctgggagacaaggccgccttttctcatcagctctggcactgtctggaggaaaggactcagttcggggctggactggcagtgaaggaagatggtgtaccctctccccttcactgacccttgatggccttctcctctttgcttggtctctcttctcttctgcctgtcctgggcacattgtctggctgtcatccaatgtctctgtctaaatgccctcctgccccctggcctcggggcccggaaacacctgccccctgtctcccacttctgcccaccggtttctgtctgcacctcggtgtgtcccactctcactctccctcttactggcctgcctctccatcagtctctctgtctctccagggacccacgaggagggaaccaaggctactttccccaagtactgaggtggtggacatcgtctctgccactcctgacccagccctgaacaaagcacctcaagtgcaaaggaccaaagggggccctggcttggagtgggttggcttgctgatggcttgctggaggggacgctggctaaagtgggtaggccttggcccacctgaggccccaggtgggaacatggtcacccccactctgcataccctcatcaaaaacactctcactatgctgctatggacgacctccagctctcagttacaagtgcaggcgactggaggcaggactcctgggtccctgggaaagagggtactaggggcccggatccaggattctgggaggcttcagttaccgctggccgagctgaagaactgggtatgaggctggggcggggctggaggtggcgccccctggtgggacaacaaagaggacaccatttttccagagctgcagagagcacctggtggggaggaagaagtgtaagtcaccagcctctgctcttatctttgtaataaatgttaaagccag

SEQ ID NO: 6192 - DNA, 738 bp, Homo sapien; identical to SEQ ID NO: 3063

SEQ ID NO: 6193 - protein, 225 aa, Homo sapien; identical to SEQ ID NO: 3064

SEQ ID NO: 6194 - DNA, 3207 bp, Homo sapien; identical to SEQ ID NO: 2109

SEQ ID NO: 6195 - protein, 876 aa, Homo sapien; identical to SEQ ID NO: 2110

SEQ ID NO: 6196 - DNA, 1991 bp, Homo sapien; identical to SEQ ID NO: 1770

SEQ ID NO: 6197 - protein, 525 aa, Homo sapien; identical to SEQ ID NO: 1771

SEQ ID NO: 6198 - DNA, 3868 bp, Homo sapien; identical to SEQ ID NO: 1586

SEQ ID NO: 6199 - protein, 202 aa, Homo sapien; identical to SEQ ID NO: 1587

SEQ ID NO: 6200 - DNA, 6305 bp, Homo sapien
gaattcctgggctcagaggtcctcccaccttagccttctgagtagctaggactacagacaccagctaccacatgaggctttgtagaaatggggtcttactatgttgcccaggctgattttgaactcctggtctcaagcaatctttccaccttagccttccaaagtgctggaattacaggagtgggccactgcacctggctctattaacattttttatttgctttatcacatatttatcaatccatctcacttttaaatatcttttaaaattacaaatatcagtacattttacatctaaacccttcagaagcttaacattgactggagttcagtatttatttccccatttcttttctggcctgaggaaggcaaattttacatacaaatctcaagtcagtactcttttttttttttgagacggagtcttgctctgttgcccaggctggagtccagtggtgtgatcttggctcactgcaacctctgccttctgggtacaagcgattctcctgtctcagcctcccaagtagctgggactacaggtttgtgccaccatatccagctaatttttgtatttttaatggagaaggggtttcaccatgttggccaggctggtctcaaactcttgacctcaagtgatccacctgccttggtctcctaaagtgctgggattataggtgtgagccatctcgcctggcctaatactgttttgtttgtttgtttttgtttttaagacagagtcttgttcttgtcacccaggctggagtgcaatggcatgatttcggctcactgcaacttccgcctcctgggttcaagtgattctcctgcctcagcctcccaagtagctggaattaaaggtgcctaccaccacgccccgctaatttttatatttttagtagagatggggtttcaccatgttgatcaggctgctctcgagctccttacctcagatgatccaccttccttggcctcccaaagtgctggtattataggcaagagccactgcgcccagccccagtattcagtttttaaactgtcttgttatcaaggctctggagccagatgcctgggttcaaattctggttctgccactgactctgtgagctccataagtttcttaacctctctgtacctcagtttcctcttagggtttttgtcaggattataattattggctgggcatgatggctcatgcttgtaatcccagcactttaggaggccaacacgggcagatcacgtgagtccaggagtttgagcccagcctgggcaatgtggcaaaaatccatctctacaaaaaatgcaaaaattagctgggcatggtggcatgtgcctatagtcccagctattcaggaggctgaggtaggtgaatccatagatcctgggaggtcaaggctgcagtgagccatgatcctgccattgcattccagtctgggtgacatagcgagaccctgtctcaaaaaaaaaaattattaaagtgtgtaaatcagtggcataaacatgttaagtgcattttgtgggtcagctatattattattagtattacggaaacacatagagatgttaccaagaaggggagatgattggagccacttccagcttccttggacctggtctttcttcccttgactctttttttttttttttttttttttttgagagagagagtctcagcctgttgcccaggctggagtgcaatggtgcaatcttggctcactgcaacctctgcctcccaggtttaagtgattctcctgcctcagcctcctgtgtagctggaattacaggcgcgtgccaccacgcccggctaactttttgtatctttagtagagacagggtttcaccatgttggccaggctggtctcgaactcctgacctcaagtgatccacctgcctcagcctcccaaagtgttgggattacaggtgtaagccactaccccggctactcccttgactcttaaccactcatgctgcctacatctaccattcatgtggtccttgctgctttgttttggttattcctgcatttatttgtccttttattcatttatgtataaacatttagtaagcacctactaatggatagggctcattgtagacttggaagctctctgagggtgggagtatgcctcgtccatctgtctttactttttgtagcaagggaggtaaagctccatttccatccctccttagtgagtcagtagtcagtggtgaggctaaggcttacctctccctttctcactcagcacagggggctggagatgagcaagggaacgggaggaggtcagcccagtatgggaatcagttcttctcagggaacccagacatccatccctcaagattccagtccttgtcctagtccggcccttgacctcagagacgggatcagctcttcctccagcacctaccttgagggtatagaagaatgcaaaccacattggaaacctggagatctgtgttctcatttcagctctgctgactggcttcctgcaagctaccttccctccctgggcctcagtttctctctctgctgagccagaagatgtctaaagacccctttggttccaccctgagagcctgtctccctaacctcaacttcttccccagttcagagaacccaggcatccagctgccccaccccagctctgggtaaacaggaagctgggtgaggggagcaggggtgtgcggaaagtcccagccaggtgtgcaggtctacagggagggggtgggcccgtccctgaggtatgaaagccccctgctctggctctggttcagtctcaatgggggcactggggctggagggcaggggtgggaggctccaggggaggggttccctcctgctagctgtggcaggagccacttctctggtgaccttgttgctggcggtgcctatcactgtcctggctgtgctggccttagtgccccaggatcagggaggactggtgagtggctgcaacaggccctggtggagagttgtatcttgcggatgcttggctccctctggttgtgcctgtggtcttttgccccctctggctcagctggctcggctgtccctggtggggatgtcttgtctctttgctgactctctttccatgttcctgtgatgttgtgcttgtgtcccgacataagccccttgtgtctcctctcctcttcccgaggtacatctgtttctccgcccaagtacctatgccttgcttgttctcccttctaaggaggtgtgtgttggggatggtgctggtaggagaaaccccaggcctgcagcttgggtccactttcagaggggtaggggtgacatgagctgaatctgaactctgggcactgtgaccccacccaaccaggtaacggagacggccgaccccggggcacaggcccagcaaggactgggtaagagcagactgtctctccttccccgcttcagaccctcaggggctcccagctccctgctgcgtccccagatacctcttcctctaggaatccaggctccccatccctgcgccctgttctctcaagggtagcctgcatgggtggctgccctgcccccaatcgtggactctttgccccttccagggtttcagaagctgccagaggaggagccagaaacagatctcagccccgggctcccagctgcccacctcataggtaaggacctccaagacctgaataagagtgtaaataatccgaaggttccagttctgctcgcccagagtccttcggctccatgattccagtgctcggtttcccacccgcttcacgaccttttgtcgctcgtgcccactcttacgctcgtccccgcagtgtagtttcttcttccctccggtgcaagcaaaagccggcctggaggtccccactacagcgttctgcaccccacatccgtgttccctcggcccccaactcgcactcatcccagaaacagcaccatccctcctcccccggcccggctcggctcccgcaggggctaaaagccgccacttccccagaagtcccaagcctttaggatcgcattcccaagagcgcgtcggcccgtgtctccgcaggcgctccgctgaaggggcaggggctaggctgggagacgacgaaggaacaggcgtttctgacgagcgggacgcagttctcggacgccgaggggctggcgctcccgcaggacggcctctattacctctactgtctcgtcggctaccggggccgggcgccccctggcggcggggacccccagggccgctcggtcacgctgcgcagctctctgtaccgggcggggggcgcctacgggccgggcactcccgagctgctgctcgagggcgccgagacggtgactccagtgctggacccggccaggagacaagggtacgggcctctctggtacacgagcgtggggttcggcggcctggtgcagctccggaggggcgagagggtgtacgtcaacatcagtcaccccgatatggtggacttcgcgagagggaagaccttctttggggccgtgatggtggggtgagggaatatgagtgcgtggtgcgagtgcgtgaatattgggggcccggacgcccaggaccccatggcagtgggaaaaatgtaggagactgtttggaaattgattttgaacctgatgaaaataaagaatggaaagcttcagtgctgccgataaagatgctgagttgcgacacacgtcttaattcagggtgggtgcacgggtgcgggttaaatattctcagtactcttctggttgcttgaaacaattcatcacaacacagtgtatggcctttgctcctagggatgatggtctgcctgtcccaccccctccctgcctctgaatggccaggccccaccattagcccagttggagggtgggaggaagggggacttctcaaactccgaagcttctctaggcatcctgattttcagggccacatggtcccaaccagactctgcaccatactcttttctcttgggtaccccccaacagtgagaggggtcattacagagcccagcaagcaccactcagaaaggcccagcagcagagtaagcccctatcatgacagaggaatgaagcctggaggggccccgcacttctccccctagagctgcctgaaggcctctctgtctcctacccgacagtcaactcttctcctccaaggagcttaattcaaggctcatggggtctgaagggaggaggctgaaggagaaagaaggggagaatattagagagagatggggatggcaggaaggagcctgtggtgcctgaaaacaccaggaagttctggggaggaggaaaaaccgatgccccacttagggtgtcccatttagggtgagacggaaaatcctcacctttttttcacactttaggtcccccttcccaaaagtgagtaagtgtgggtgcttctgggatgagtaacagtgtcccccattacttcatggctgactttcagccacaggctggaggaggcagagggtgacccaaggccctatctaggtcaccccaatgggtcaccctaccccctcagcctaccacatggttttctcctgcctggcaccccagggctggaggtaaagcctaatttccgaactcagtgggggctcccagtctaggggggctcaatttccgtctccatatttgtttttggaattattatttttttgagacagggtctcgttctgtcacccagacgggggtacagtggcatgatcatagcttactgtaacctcaaactcctgggcttgagtgatcctcctgcctcagcctcctgaggagctaggattacaggcatgcaccactacacctgactaatctttaattttttttctagaaacaaggtcttgctatgttgcacaggctggtcttgaactagtgggctcaagtggtcctcccacctcagcctcccaaagtgttgggataacaggcatgagccactgcgccccacccttatttgtctttgactctctccagaagagccttcatccagggagggggtgcttttctctttccggattacccacctctcacctctcccctccttcaccacaaagaccagtgggaccaagccggcatgtgagtccttcacccacatcttattcctatgtttcattcttttttaaaaaatagagacaggatctcactatgttgcccaggttgctctggaactcctgggttcaagcgatcctctcaccttggccttgcaaagtggtaggattacaggtgcatgccaccacgtccggcagttcggttccttgttctttattgtcctcagtctcttcgatttcacccactgagagaatggaaggggatagaacagctggaaactggttgaaggaagccagaattc

SEQ ID NO: 6201 - DNA, 2619 bp, Homo sapien
gactcctaggggcttgcagacctagtgggagagaaagaacatcgcagcagccaggcagaaccaggacaggtgaggtgcaggctggctttcctctcgcagcgcggtgtggagtcctgtcctgcctcagggcttttcggagcctggatcctcaaggaacaagtagacctggccgcggggagtggggagggaaggggtgtctattgggcaacagggcggcaaagccctgaataaaggggcgcagggcaggcgcaagtgcagagccttcgtttgccaagtcgcctccagaccgcagacatgaaacttgtcttcctcgtcctgctgttcctcggggccctcggactgtgtctggctggccgtaggagaaggagtgttcagtggtgcgccgtatcccaacccgaggccacaaaatgcttccaatggcaaaggaatatgagaaaagtgcgtggccctcctgtcagctgcataaagagagactcccccatccagtgtatccaggccattgcggaaaacagggccgatgctgtgacccttgatggtggtttcatatacgaggcaggcctggccccctacaaactgcgacctgtagcggcggaagtctacgggaccgaaagacagccacgaactcactattatgccgtggctgtggtgaagaagggcggcagctttcagctgaacgaactgcaaggtctgaagtcctgccacacaggccttcgcaggaccgctggatggaatgtccctacagggacacttcgtccattcttgaattggacgggtccacctgagcccattgaggcagctgtggccaggttcttctcagccagctgtgttcccggtgcagataaaggacagttccccaacctgtgtcgcctgtgtgcggggacaggggaaaacaaatgtgccttctcctcccaggaaccgtacttcagctactctggtgccttcaagtgtctgagagacggggctggagacgtggcttttatcagagagagcacagtgtttgaggacctgtcagacgaggctgaaagggacgagtatgagttactctgcccagacaacactcggaagccagtggacaagttcaaagactgccatctggcccgggtcccttctcatgccgttgtggcacgaagtgtgaatggcaaggaggatgccatctggaatcttctccgccaggcacaggaaaagtttggaaaggacaagtcaccgaaattccagctctttggctcccctagtgggcagaaagatctgctgttcaaggactctgccattgggttttcgagggtgcccccgaggatagattctgggctgtaccttggctccggctacttcactgccatccagaacttgaggaaaagtgaggaggaagtggctgcccggcgtgcgcgggtcgtgtggtgtgcggtgggcgagcaggagctgcgcaagtgtaaccagtggagtggcttgagcgaaggcagcgtgacctgctcctcggcctccaccacagaggactgcatcgccctggtgctgaaaggagaagctgatgccatgagtttggatggaggatatgtgtacactgcatgcaaatgtggtttggtgcctgtcctggcagagaactacaaatcccaacaaagcagtgaccctgatcctaactgtgtggatagacctgtggaaggatatcttgctgtggcggtggttaggagatcagacactagccttacctggaactctgtgaaaggcaagaagtcctgccacaccgccgtggacaggactgcaggctggaatatccccatgggcctgctcttcaaccagacgggctcctgcaaatttgatgaatatttcagtcaaagctgtgcccctgggtctgacccgagatctaatctctgtgctctgtgtattggcgacgagcagggtgagaataagtgcgtgcccaacagcaacgagagatactacggctacactggggctttccggtgcctggctgagaatgctggagacgttgcatttgtgaaagatgtcactgtcttgcagaacactgatggaaataacaatgaggcatgggctaaggatttgaagctggcagactttgcgctgctgtgcctcgatggcaaacggaagcctgtgactgaggctagaagctgccatcttgccatggccccgaatcatgccgtggtgtctcggatggataaggtggaacgcctgaaacaggtgctgctccaccaacaggctaaatttgggagaaatggatctgactgcccggacaagttttgcttattccagtctgaaaccaaaaaccttctgttcaatgacaacactgagtgtctggccagactccatggcaaaacaacatatgaaaaatatttgggaccacagtatgtcgcaggcattactaatctgaaaaagtgctcaacctcccccctcctggaagcctgtgaattcctcaggaagtaaaaccgaagaagatggcccagctccccaagaaagcctcagccattcactgcccccagctcttctccccaggtgtgttggggccttggctcccctgctgaaggtggggattgcccatccatctgcttacaattccctgctgtcgtcttagcaagaagtaaaatgagaaattttgttgatattcaaaaaaaa

SEQ ID NO: 6202 - protein, 711 aa, Homo sapien
MKLVFLVLLFLGALGLCLAGRRRRSVQWCAVSQPEATKCFQWQRNMRKVRGPPVSCIKRDSPIQCIQAIAENRADAVTLDGGFIYEAGLAPYKLRPVAAEVYGTERQPRTHYYAVAVVKKGGSFQLNELQGLKSCHTGLRRTAGWNVPTGTLRPFLNWTGPPEPIEAAVARFFSASCVPGADKGQFPNLCRLCAGTGENKCAFSSQEPYFSYSGAFKCLRDGAGDVAFIRESTVFEDLSDEAERDEYELLCPDNTRKPVDKFKDCHLARVPSHAVVARSVNGKEDAIWNLLRQAQEKFGKDKSPKFQLFGSPSGQKDLLFKDSAIGFSRVPPRIDSGLYLGSGYFTAIQNLRKSEEEVAARRARVVWCAVGEQELRKCNQWSGLSEGSVTCSSASTTEDCIALVLKGEADAMSLDGGYVYTACKCGLVPVLAENYKSQQSSDPDPNCVDRPVEGYLAVAVVRRSDTSLTWNSVKGKKSCHTAVDRTAGWNIPMGLLFNQTGSCKFDEYFSQSCAPGSDPRSNLCALCIGDEQGENKCVPNSNERYYGYTGAFRCLAENAGDVAFVKDVTVLQNTDGNNNEAWAKDLKLADFALLCLDGKRKPVTEARSCHLAMAPNHAVVSRMDKVERLKQVLLHQQAKFGRNGSDCPDKFCLFQSETKNLLFNDNTECLARLHGKTTYEKYLGPQYVAGITNLKKCSTSPLLEACEFLRK

SEQ ID NO: 6203 - DNA, 1145 bp, Homo sapien; identical to SEQ ID NO: 673

SEQ ID NO: 6204 - protein, 131 aa, Homo sapien; identical to SEQ ID NO: 674

SEQ ID NO: 6205 - DNA, 2188 bp, Homo sapien; identical to SEQ ID NO: 262

SEQ ID NO: 6206 - protein, 529 aa, Homo sapien; identical to SEQ ID NO: 263

SEQ ID NO: 6207 - DNA, 2042 bp, Homo sapien
  Unsure 1490: Unknown base
ccatggctcagcctctgggtccagagcctcagctcctacctcttccctccttgccagcccctgatgcctgccagacttttgcctctgctggagcccctgcctgaccagcttcccctccctgtctggttgggatttgggggctgagctgtctggggtcccagggccaaccaatgcagtgccggctcccgcggggcctggctggagccctcctcaccctcctgtgcatggggctcctgtgtctgcggtaccacttgaacctgtccccgcagcgggtacaagggacccccgagctgagccagccgaacccggggccccctaagctacagctacacgatgtcttcattgcagtgaagacgacccgggctttccaccgcttgcgcctggagctgctgcttgacacgtgggtttccaggaccagggaactgacatttgtcttcaccgacagcccagacaaaggcctccaggagagactggggtcccaccttgtggtcaccaactgctccgcggaacacagccacccagctctgtcctgcaagatggctgctgagttcgacaccttcttggccagtgggcttaggtggttctgccatgtggacgatgacaactatgtgaacccaagggcgctgctgcagcttctgagagccttcccgctggcccgcgacgtctatgtgggaaggcccagcctgaaccggcccatccatgcctcagagccacagccccacaaccgcacgaggctggtacagttctggtttgccactgggggtgctggcttctgcatcaatcgcaaactggctttgaagatggctccgtgggccagtggctcccgtttcatggacacatctgctctcatccggctgcctgatgactgcaccatgggctatatcattgagtgcaagctgggcggccgcctgcagcccagccccctctttcactcccacctggagaccctgcagctgctgaggactgcacagctcccagaacaggtcaccctcagctacggtgtctttgaggggaaactcaacgtcattaagctacagggccccttctccccggaggaggacccctccagatttcgctccctccattgtctgctctatccagatacaccctggtgtccccagctgggtgcccgatgaatcctgaactgctgggcaaaggttgggcagagacttctgggtgtgccttggctcccaaggtggcactgtgggtccctggcaagtgtcttgtgataggcagtccctggcagggccttcgggtggttggcaagcccaggatctgagtggcaattggcactgaaggcaccccaggcccctgggaggtgagttagacagcccaggggaccaggtggaccaggtggtggccagagaggctccaggggctagactccctcaggaggctgaattgaaaaagggcagggggcacttgagctgggctggggctcaggggtcctaaccctttaggcagtgacatggcctctgggtggggtctgnccgttggccctggctaatgtctctcagtcattccccctggggctcaagcgctgggccgcccactcctgcctccctcatctgtgtcccgagttcctgaagggacatgggtggaatgatggcagaatccagggtcctgcagcacctgctgttgttgccaaccagtctcccaaagctccttgctccccaccccttgcgaacaggaccagattttgtttggagcctcagcatgccggggcccagatgatggagcataacgggtcccagccaattgtgatgatcctttttgctcatttcccagcctttcttgctgttaggggctaccatgggaccagctctggccagagggaactaagcaaatccaatagagatgtttctggggaaggttttgcagcccactccccatcttcctgctataaatgtgggtgtgatggctggatctggggcagccaccttgctaccatgaaggaaaggccaagacaatcatccacagctattccctccagcatctggttctgtacaaaaattaaatgcttatttgtttaagtcaaaaaa

SEQ ID NO: 6208 - protein, 321 aa, Homo sapien [sequence omitted]

SEQ ID NO: 6209 - DNA, 2545 bp, Homo sapien; identical to SEQ ID NO: 1208

SEQ ID NO: 6210 - protein, 125 aa, Homo sapien; identical to SEQ ID NO: 1209

SEQ ID NO: 6211 - DNA, 1670 bp, Homo sapien; identical to SEQ ID NO: 1500

SEQ ID NO: 6212 - protein, 407 aa, Homo sapien; identical to SEQ ID NO: 1501

SEQ ID NO: 6213 - DNA, 2627 bp, Homo sapien
gctgacgccttcgagcgcggcccggggcccggagcggccggagcagcccgggtcctgaccccggcccggctcccgctccgggctctgccggcgggcgggcgagcgcggcgcggtccgggccggggggatgtctcggcggacgcgctgcgaggatctggatgagctgcactaccaggacacagattcagatgtgccggagcagagggatagcaagtgcaaggtcaaatggacccatgaggaggacgagcagctgagggccctggtgaggcagtttggacagcaggactggaagttcctggccagccacttccctaaccgcactgaccagcaatgccagtacaggtggctgagagttttgaatccagaccttgtcaaggggccatggaccaaagaggaagaccaaaaagtcatcgagctggttaagaagtatggcacaaagcagtggacactgattgccaagcacctgaagggccggctggggaagcagtgccgtgaacgctggcacaaccacctcaaccctgaggtgaagaagtcttgctggaccgaggaggaggaccgcatcatctgcgaggcccacaaggtgctgggcaaccgctgggccgagatcgccaagatgttgccagggaggacagacaatgctgtgaagaatcactggaactctaccatcaaaaggaaggtggacacaggaggcttcttgagcgagtccaaagactgcaagcccccagtgtacttgctgctggagctcgaggacaaggacggcctccagagtgcccagcccacggaaggccagggaagtcttctgaccaactggccctccgtccctcctaccataaaggaggaggaaaacagtgaggaggaacttgcagcagccaccacatcgaaggaacaggagcccatcggtacagatctggacgcagtgcgaacaccagagcccttggaggaattcccgaagcgtgaggaccaggaaggctccccaccagaaacgagcctgccttacaagtgggtggtggaggcagctaacctcctcatccccgctgtgggttctagcctctctgaagccctggacttgatcgagtcggaccctgatgcttggtgtgacctgagtaaatttgacctccctgaggaaccatctgcagaggacagtatcaacaacagcctagtgcagctgcaagcgtcacatcagcagcaagtcctgccaccccgccagccttccgccctggtgcccagtgtgaccgagtaccgcctggatggccacaccatctcagacctgagccggagcagccggggcgagctgatccccatctcccccagcactgaagtcgggggctctggcattggcacaccgccctctgtgctcaagcggcagaggaagaggcgtgtggctctgtcccctgtcactgagaatagcaccagtctgtccttcctggattcctgtaacagcctcacgcccaagagcacacctgttaagaccctgcccttctcgccctcccagtttctgaacttctggaacaaacaggacacattggagctggagagcccctcgctgacatccaccccagtgtgcagccagaaggtggtggtcaccacaccactgcaccgggacaagacacccctgcaccagaaacatgctgcgtttgtaaccccagatcagaagtactccatggacaacactccccacacgccaaccccgttcaagaacgccctggagaagtacggacccctgaagcccctgccacagaccccgcacctggaggaggacttgaaggaggtgctgcgttctgaggctggcatcgaactcatcatcgaggacgacatcaggcccgagaagcagaagaggaagcctgggctgcggcggagccccatcaagaaagtccggaagtctctggctcttgacattgtggatgaggatgtgaagctgatgatgtccacactgcccaagtctctatccttgccgacaactgccccttcaaactcttccagcctcaccctgtcaggtatcaaagaagacaacagcttgctcaaccagggcttcttgcaggccaagcccgagaaggcagcagtggcccagaagccccgaagccacttcacgacacctgcccctatgtccagtgcctggaagacggtggcctgcggggggaccagggaccagcttttcatgcaggagaaagcccggcagctcctgggccgcctgaagcccagccacacatctcggaccctcatcttgtcctgaggtgttgagggtgtcacgagcccattctcatgtttacaggggttgtgggggcagagggggtctgtgaatctgagagtcattcaggtgacctcctgcagggagccttctgccaccagcccctccccagactctcaggtggaggcaacagggccatgtgctgccctgttgccgagcccagctgtgggcggctcctggtgctaacaacaaagttccacttccaggtctgcctggttccctccccaaggccacagggagctccgtcagcttctcccaagcccacgtcaggcctggcctcatctcagaccctgcttaggatgggggatgtggccaggggtgctcctgtgctcaccctctcttggtgcatttttttggaagaataaaattgcctctctctttg

SEQ ID NO: 6214 - protein, 700 aa, Homo sapien
MSRRTRCEDLDELHYQDTDSDVPEQRDSKCKVKWTHEEDEQLRALVRQFGQQDWKFLASHFPNRTDQQCQYRWLRVLNPDLVKGPWTKEEDQKVIELVKKYGTKQWTLIAKHLKGRLGKQCRERWHNHLNPEVKKSCWTEEEDRIICEAHKVLGNRWAEIAKMLPGRTDNAVKNHWNSTIKRKVDTGGFLSESKDCKPPVYLLLELEDKDGLQSAQPTEGQGSLLTNWPSVPPTIKEEENSEEELAAATTSKEQEPIGTDLDAVRTPEPLEEFPKREDQEGSPPETSLPYKWVVEAANLLIPAVGSSLSEALDLIESDPDAWCDLSKFDLPEEPSAEDSINNSLVQLQASHQQQVLPPRQPSALVPSVTEYRLDGHTISDLSRSSRGELIPISPSTEVGGSGIGTPPSVLKRQRKRRVALSPVTENSTSLSFLDSCNSLTPKSTPVKTLPFSPSQFLNFWNKQDTLELESPSLTSTPVCSQKVVVTTPLHRDKTPLHQKHAAFVTPDQKYSMDNTPHTPTPFKNALEKYGPLKPLPQTPHLEEDLKEVLRSEAGIELIIEDDIRPEKQKRKPGLRRSPIKKVRKSLALDIVDEDVKLMMSTLPKSLSLPTTAPSNSSSLTLSGIKEDNSLLNQGFLQAKPEKAAVAQKPRSHFTTPAPMSSAWKTVACGGTRDQLFMQEKARQLLGRLKPSHTSRTLILS

SEQ ID NO: 6215 - DNA, 4483 bp, Homo sapien
ttcggcacgaggcgcggttgcacgtcggccccagccctgaggagccggaccgatgtggaaactgctgcccgccgcgggcccggcaggaggagaaccatacagacttttgactggcgttgagtacgttgttggaaggaaaaactgtgccattctaattgaaaatgatcagtcgatcagccgaaatcatgctgtgttaactgctaacttttctgtaaccaacctgagtcaaacagatgaaatccctgtattgacattaaaagataattctaagtatggtacctttgttaatgaggaaaaaatgcagaatggcttttcccgaactttgaagtcgggggatggtattacttttggagtgtttggaagtaaattcagaatagagtatgagcctttggttgcatgctcttcttgtttagatgtctctgggaaaactgctttaaatcaagctatattgcaacttggaggatttactgtaaacaattggacagaagaatgcactcaccttgtcatggtatcagtgaaagttaccattaaaacaatatgtgcactcatttgtggacgtccaattgtaaagccagaatattttactgaattcctgaaagcagttcagtccaagaagcagcctccacaaattgaaagtttttacccacctcttgatgaaccatctattggaagtaaaaatgttgatctgtcaggacggcaggaaagaaaacaaatcttcaaagggaaaacatttatatttttgaatgccaaacagcataagaaattgagttccgcagttgtctttggaggtggggaagctaggttgataacagaagagaatgaagaagaacataatttctttttggctccgggaacgtgtgttgttgatacaggaataacaaactcacagaccttaattcctgactgtcagaagaaatggattcagtcaataatggatatgctccaaaggcaaggtcttagacctattcctgaagcagaaattggattggcggtgattttcatgactacaaagaattactgtgatcctcagggccatcccagtacaggattaaagacaacaactccaggaccaagcctttcacaaggcgtgtcagttgatgaaaaactaatgccaagcgccccagtgaacactacaacatacgtagctgacacagaatcagagcaagcagatacatgggatttgagtgaaaggccaaaagaaatcaaagtctccaaaatggaacaaaaattcagaatgctttcacaagacgcacccactgtaaaggagtcctgcaaaacaagctctaataataatagtatggtatcaaatactttggctaagatgagaatcccaaactatcagctttcaccaactaaattgccaagtataaataaaagtaaagatagggcttctcagcagcagcagaccaactccatcagaaactactttcagccgtctaccaaaaaaagggaaagggatgaagaaaatcaagaaatgtcttcatgcaaatcagcaagaatagaaacgtcttgttctcttttagaacaaacacaacctgctacaccctcattgtggaaaaataaggagcagcatctatctgagaatgagcctgtggacacaaactcagacaataacttatttacagatacagatttaaaatctattgtgaaaaattctgccagtaaatctcatgctgcagaaaagctaagatcaaataaaaaaagggaaatggatgatgtggccatagaagatgaagtattggaacagttattcaaggacacaaaaccagagttagaaattgatgtgaaagttcaaaaacaggaggaagatgtcaatgttagaaaaaggccaaggatggatatagaaacaaatgacactttcagtgatgaagcagtaccagaaagtagcaaaatatctcaagaaaatgaaattgggaagaaacgtgaactcaaggaagactcactatggtcagctaaagaaatatctaacaatgacaaacttcaggatgatagtgagatgcttccaaaaaagctgttattgactgaatttagatcactggtgattaaaaactctacttccagaaatccgtctggcataaatgatgattatggtcaactaaaaaatttcaagaaattcaaaaaggtcacatatcctggagcaggaaaacttccacacatcattggaggatcagatctaatagctcatcatgctcgaaagaatacagaactagaagagtggctaaggcaggaaatggaggtacaaaatcaacatgcaaaagaagagtctcttgctgatgatctttttagatacaatccttatttaaaaaggagaagataactgaggattttaaaaagaagccatggaaaaacttcctagtaagcatctacttcaggccaacaaggttatatgaatatatagtgtatagaagcgatttaagttacaatgttttatggcctaaatttattaaataaaatgcacaaaactttgattcttttgtatgtaacaattgtttgttctgttttcaggctttgtcattgcatctttttttcatttttaaatgtgttttgtttattaaatagttaatatagtcacagttcaaaattctaaatgtacgtaaggtaaagactaaagtcacccttccaccattgtcctagctacttggttcccctcagaaaaaaattcatgatactcatttcttatgaatctttccagggatttttgagtcctattcaaattcctatttttaaataatttcctacacaaatgatagcataacatatgcagtgttctacaccttgcttttttacttagtagattaaaaattataggaatatcaatataatgtttttaatattttttcttttccattatgctgtagtcttacctaaactctggtgatccaaacaaaatggcttcagtggtgcagatgtcacctacatgttattctagtactagaaactgaagaccatgtggagacttcatcaaacatgggtttagttttcaccagaatggaaagacctgtacccctttttggtggtcttactgagctgggtgggtgtctgttttgagcttatttagagtcctagttttcctacttataaagtagaaatggtgagattgttttctttttctaccttaaagggagatggtaagaaacaatgaatgtcttttttcaaactttattgacaagtgattttcaagtctgtgttcaaaaatatattcatgtacctgtgatccagcaagaagggagttccagtcaagagtcactacaactgattagttgtttagagaatgagaaatggaacagtgaggaatggaggccatatttccatgacttcccttgtaaacagaagcaacagaagggacaagaggctggcctctacatcactctcaccttccaaatcttgtggaagtgcatctacttgccagaaccaaattaacttacttccaagttctggctgcttgcaggtggaactccagctgcaagggagttagggaaatgaaggtctttttttaaaagcttctcagccttcctagggaacagaaattgggtgagccaatctgcaatttctactacaggcattgagaccagttagattattgaaatattatagagagttatgaacacttaaattatgatagtggtatgacattggatagaacatgggatactttagaagtagaattgacagggcatattagttgatgaaatggagtcatttgagtctcttaatagccatgtatcataattaccaagtgaagctggtggaacatatggtctccattttacagttaaggaatataatggacagattaatattgttctctgtcatgcccacaatccctttctaaggaagactgccctactatagcagtttttatatttgtcaatttatgaatataatgaatgaggagttctggtacctcctgtctttacaaatattgggtgttgtccagtatttttccctttttaaccattccaatcggtgtgtagtgatgtttcattttggttttaatttgtatatccctgatagctataattgggtcatagaaattctttatacattctagatgcaagtctcttgtcggatatatgtattgagatattacacctagtctgtggcttgactgttttctttatgtcttttgatgaatagaagttttaaattttgacaaggtcaaatttatttttttcttttgtttgatattttttctctccaatttaaccccaagatttcagatattctgctctattatataaactttatatttttatatttgtgatctaccttgaattgatatgtatgttgtgaattatggatcagggttctttttttcccccatacaagtatccagtcattgtaacactgtttattgaaagaattatcctttcctcattaaattaccttgccaattagtctcgtgccgaattcctgcagcccgggggatccactagttctagagcggccgccaccgcggtggagctccagcttttgttccctt

SEQ ID NO: 6216 - protein, 754 aa, Homo sapien [sequence omitted]

SEQ ID NO: 6217 - DNA, 1986 bp, Homo sapien
catgattcccaagcttggcacgagggtccgcaagcccggctgagagcgcgccatggggcaggcgggctgcaaggggctctgcctgtcgctgttcgactacaagaccgagaagtatgtcatcgccaagaacaagaaggtgggcctgctgtaccggctgctgcaggcctccatcctggcgtacctggtcgtatgggtgttcctgataaagaagggttaccaagacgtcgacacctccctgcagagtgctgtcatcaccaaagtcaagggcgtggccttcaccaacacctcggatcttgggcagcggatctgggatgtcgccgactacgtcattccagcccaggaaaagaacgtcttttttgtggtcaccaacctgattgtgacccccaaccagcggcagaacgtctgtgctgagaatgaaggcattcctgatggcgcgtgctccaaggacagcgactgccacgctggggaagcggttacagctggaaacggagtgaagaccggccgctgcctgcggagagagaacttggccaggggcacctgtgagatctttgcctggtgcccgttggagacaagctccaggccggaggagccattcctgaaggaggccgaagacttcaccattttcataaagaaccacatccgtttccccaaattcaacttctccaacaatgtgatggacgtcaaggacagatctttcctgaaatcatgccactttggccccaagaaccactactgccccatcttccgactgggctccgtgatccgctgggccgggagcgacttccaggatatagccctggagggtggcgtgataggaattaatattgaatggaactgtgatcttgataaagctgcctctgagtgccaccctcactattcttttagccgtctggacaataaactttcaaagtctgtctcctccgggtacaacttcagatttgccagatattaccgagacgcagccggggtggagttccgcaccctgatgaaagcctacgggatccgctttgacgtgatggtgaacggcaagggtgcctccttctgcgacctggtactcatctacctcatcaaaaagagagagttttaccgtgacaagaagtaccaggaagtgaggggcctagaagacagttcccaggaggccgaggacgaggcatcggggctggggctatctgagcagctcacatctgggccagggctgctggggatgccggagcagcaggagctgcaggagccacccgaggcgaacgttggaagcagcagtcagaaggggaacggatctgtgtgcccacagctcctggagccccacaggagcacgtgaattgcctctgcttacgttcaggccctgtcctaaacccagccgtctagcacccagtgatcccatgcctttgggaatcccaggatgctgcccaacgggaaatttgtacattgggtgctatgaatgccacatcacagggaccagccatcacagagcaaagtgacctccacgtctgatgctggggtcatcaggacggacccatcatggctatctttttgccccaccccctgccgtcagttcttcctttctccgtggctggcttcccgcactagggaacgggttgtaaatggggaacatgacttccttccggagtccttgagcacctcagctaaggaccgcagtgccctgtagagttcctagattacctcactgggaatagcattgtgcgtgtccggaaaagggctccatttggttccagcccactcccctctgcaagtgccgcagcttccctcaggcatactctccagtggatccaagtactctctctcctaaagacaccaccttcctgccagctgtttgcccttaggccagtacacagaattgaaagtgggggaggtggcagacgctttctgggacctgcccaagatatgtattctctgacactcttatttggtcataaaacaataaatggtgtcaatttcaaaaaaaaaaaaaaaaaaaaaaaaaaaaaa

SEQ ID NO: 6218 - protein, 421 aa, Homo sapien [sequence omitted]

SEQ ID NO: 6219 - DNA, 4180 bp, Homo sapien
gcggggaagcagcagcggccaggatgaatcccaggtgctctggagctggatggtgaaggtcggcactcttcaccctcccgagccctgcccgtctcggccccatgcccccaccagtcagccccgggccacaggcagtgagcaggcacctgggagccgaggccctatgaccaggccaaggagacgggcgctccagggtcccagccacctgtcccccccatggagctgaggccctggttgctatgggtggtagcagcaacaggaaccttggtcctgctagcagctgatgctcagggccagaaggtcttcaccaacacgtgggctgtgcgcatccctggaggcccagcggtggccaacagtgtggcacggaagcatgggttcctcaacctgggccagatcttcggggactattaccacttctggcatcgaggagtgacgaagcggtccctgtcgcctcaccgcccgcggcacagccggctgcagagggagcctcaagtacagtggctggaacagcaggtggcaaagcgacggactaaacgggacgtgtaccaggagcccacagaccccaagtttcctcagcagtggtacctgtctggtgtcactcagcgggacctgaatgtgaaggcggcctgggcgcagggctacacagggcacggcattgtggtctccattctggacgatggcatcgagaagaaccacccggacttggcaggcaattatgatcctggggccagttttgatgtcaatgaccaggaccctgacccccagcctcggtacacacagatgaatgacaacaggcacggcacacggtgtgcgggggaagtggctgcggtggccaacaacggtgtctgtggtgtaggtgtggcctacaacgcccgcattggaggggtgcgcatgctggatggcgaggtgacagatgcagtggaggcacgctcgctgggcctgaaccccaaccacatccacatctacagtgccagctggggccccgaggatgacggcaagacagtggatgggccagcccgcctcgccgaggaggccttcttccgtggggttagccagggccgaggggggctgggctccatctttgtctgggcctcggggaacgggggccgggaacatgacagctgcaactgcgacggctacaccaacagtatctacacgctgtccatcagcagcgccacgcagtttggcaacgtgccgtggtacagcgaggcctgctcgtccacactggccacgacctacagcagtggcaaccagaatgagaagcagatcgtgacgactgacttgcggcagaagtgcacggagtctcacacgggcacctcagcctctgcccccttagcagccggcatcattgctctcaccctggaggccaataagaacctcacatggcgggacatgcaacacctggtggtacagacctcgaagccagcccacctcaatgccaacgactgggccaccaatggtgtgggccggaaagtgagccactcatatggctacgggcttttggacgcaggcgccatggtggccctggcccagaattggaccacagtggccccccagcggaagtgcatcatcgacatcctcaccgagcccaaagacatcgggaaacggctcgaggtgcggaagaccgtgaccgcgtgcctgggcgagcccaaccacatcactcggctggagcacgctcaggcgcggctcaccctgtcctataatcgccgtggcgacctggccatccacctggtcagccccatgggcacccgctccaccctgctggcagccaggccacatgactactccgcagatgggtttaatgactgggccttcatgacaactcattcctgggatgaggatccctctggcgagtgggtcctagagattgaaaacaccagcgaagccaacaactatgggacgctgaccaagttcaccctcgtactctatggcaccgcccctgaggggctgcccgtacctccagaaagcagtggctgcaagaccctcacgtccagtcaggcctgtgtggtgtgcgaggaaggcttctccctgcaccagaagagctgtgtccagcactgccctccaggcttcgccccccaagtcctcgatacgcactatagcaccgagaatgacgtggagaccatccgggccagcgtctgcgccccctgccacgcctcatgtgccacatgccaggggccggccctgacagactgcctcagctgccccagccacgcctccttggaccctgtggagcagacttgctcccggcaaagccagagcagccgagagtccccgccacagcagcagccacctcggctgcccccggaggtggaggcggggcaacggctgcgggcagggctgctgccctcacacctgcctgaggtggtggccggcctcagctgcgccttcatcgtgctggtcttcgtcactgtcttcctggtcctgcagctgcgctctggctttagttttcggggggtgaaggtgtacaccatggaccgtggcctcatctcctacaaggggctgccccctgaagcctggcaggaggagtgcccgtctgactcagaagaggacgagggccggggcgagaggaccgcctttatcaaagaccagagcgccctctgatgagcccactgcccaccccctcaagccaatcccctccttgggcactttttaattcaccaaagtatttttttatcttgggactgggtttggaccccagctgggaggcaagaggggtggagactgtttcccatcctaccctcgggcccacctggccacctgaggtgggcccaggaccagctggggcgtggggagggccgtaccccaccctcagcaccccttccatgtggagaaaggagtgaaacctttagggcagcttgccccggccccggccccagccagagttcctgcggagtgaagaggggcagcccttgcttgttgggattcctgacccaggccgcagctcttgcccttccctgtccctctaaagcaataatggtcccatccaggcagtcgggggctggcctaggagatatctgagggaggaggccacctctccaagggcttctgcaccctccaccctgtcccccagctctggtgagtcttggcggcagcagccatcataggaagggaccaaggcaaggcaggtgcctccaggtgtgcacgtggcatgtggcctgtggcctgtgtcccatgacccacccctgtgctccgtgcctccaccaccactggccaccaggctggcgcagccaaggccgaagctctggctgaaccctgtgctggtgtcctgaccaccctcccctctcttgcacccgcctctcccgtcagggcccaagtccctgttttctgagcccgggctgcctgggctgttggcactcacagacctggagcccctgggtgggtggtggggaggggcgctggcccagccggcctctctggcctcccacccgatgctgctttcccctgtggggatctcaggggctgtttgaggatatattttcactttgtgattatttcactttagatgctgatgatttgtttttgtatttttaatgggggtagcagctggactacccacgttctcacacccaccgtccgccctgctcctccctggctgccctggccctgaggtgtgggggctgcagcatgttgctgaggagtgaggaatagttgagccccaagtcctgaagaggcgggccagccaggcgggctcaaggaaagggggtcccagtgggaggggcaggctgacatctgtgtttcaagtggggctcgccatgccgggggttcataggtcactggctctccaagtgccagaggtgggcaggtggtggcactgagcccccccaacactgtgccctggtggagaaagcactgacctgtcatgcccccctcaaacctcctcttctgacgtgccttttgcacccctcccattaggacaatcagtcccctcccatctgggagtccccttttcttttctaccctagccattcctggtacccagccatctgcccaggggtgccccctcctctcccatccccctgccctcgtggccagcccggctggttttgtaagatactgggttggtgcacagtgatttttttcttgtaatttaaacaggcccagcattgctggttctatttaatggacatgagataatgttagaggttttaaagtgattaaacgtgcagactatgcaaaccag

SEQ ID NO: 6220 - protein, 794 aa, Homo sapien; identical to SEQ ID NO: 622

SEQ ID NO: 6221 - DNA, 1231 bp, Homo sapien; identical to SEQ ID NO: 360

SEQ ID NO: 6222 - protein, 261 aa, Homo sapien; identical to SEQ ID NO: 361

SEQ ID NO: 6223 - DNA, 1701 bp, Homo sapien
gagcaccgcacactcacttcaccctggttcaacacccccacgaggttgaccccgtcattatgttagagattatgcattttccacatagggaaactgaggctcaggggtgttaagtgactcacccaaggtcacacggctaggaagttgctgcacgctcctatgctccatttcctctgggagcctatcaacccagataaagcgggacctcctctctggtagaggtgcagggggcagtactcaacatgatcacagagggagcgcaggcccctcgattgttgctgccgccgctgctcctgctgctcaccctgccagccacaggctcagaccccgtgctctgcttcacccagtatgaagaatcctccggcaagtgcaagggcctcctggggggtggtgtcagcgtggaagactgctgtctcaacactgcctttgcctaccagaaacgtagtggtgggctctgtcagccttgcaggtccccacgatggtccctgtggtccacatgggccccctgttcggtgacgtgctctgagggctcccagctgcggtaccggcgctgtgtgggctggaatgggcagtgctctggaaaggtggcacctgggaccctggagtggcagctccaggcctgtgaggaccagcagtgctgtcctgagatgggcggctggtctggctgggggccctgggagccttgctctgtcacctgctccaaagggacccggacccgcaggcgagcctgtaatcaccctgctcccaagtgtgggggccactgcccaggacaggcacaggaatcagaggcctgtgacacccagcaggtctgccccacacacggggcctgggccacctggggcccctggaccccctgctcagcctcctgccacggtggaccccacgaacctaaggagacacgaagccgcaagtgttctgcacctgagccctcccagaaacctcctgggaagccctgcccggggctagcctacgagcagcggaggtgcaccggcctgccaccctgcccagtggctgggggctgggggccttggggccctgtgagcccctgccctgtgacctgtggcctgggccagaccatggaacaacggacgtgcaatcaccctgtgccccagcatgggggccccttctgtgctggcgatgccacccggacccacatctgcaacacagctgtgccctgccctgtggatggggagtgggactcgtggggggagtggagcccctgtatccgacggaacatgaagtccatcagctgtcaagaaatcccgggccagcagtcacgcgggaggacctgcaggggccgcaagtttgacggacatcgatgtgccgggcaacagcaggatatccggcactgctacagcatccagcactgccccttgaaaggatcatggtcagagtggagtacctgggggctgtgcatgcccccctgtggacctaatcctacccgtgcccgccagcgcctctgcacacccttgctccccaagtacccgcccaccgtttccatggtcgaaggtcagggcgagaagaacgtgaccttctgggggagaccgctgccacggtgtgaggagctacaagggcagaagctggtggtggaggagaaacgaccatgtctacacgtgcctgcttgcaaagaccctgaggaagaggaactctaacacttctctcctccactctgagccccctgaccttccaaacctcaataaa

SEQ ID NO: 6224 - protein, 469 aa, Homo sapien
MITEGAQAPRLLLPPLLLLLTLPATGSDPVLCFTQYEESSGKCKGLLGGGVSVEDCCLNTAFAYQKRSGGLCQPCRSPRWSLWSTWAPCSVTCSEGSQLRYRRCVGWNGQCSGKVAPGTLEWQLQACEDQQCCPEMGGWSGWGPWEPCSVTCSKGTRTRRRACNHPAPKCGGHCPGQAQESEACDTQQVCPTHGAWATWGPWTPCSASCHGGPHEPKETRSRKCSAPEPSQKPPGKPCPGLAYEQRRCTGLPPCPVAGGWGPWGPVSPCPVTCGLGQTMEQRTCNHPVPQHGGPFCAGDATRTHICNTAVPCPVDGEWDSWGEWSPCIRRNMKSISCQEIPGQQSRGRTCRGRKFDGHRCAGQQQDIRHCYSIQHCPLKGSWSEWSTWGLCMPPCGPNPTRARQRLCTPLLPKYPPTVSMVEGQGEKNVTFWGRPLPRCEELQGQKLVVEEKRPCLHVPACKDPEEEEL

SEQ ID NO: 6225 - DNA, 1384 bp, Homo sapien
atcaacattgtctgtaattcagcttatgttgtaaacgtagccagtcacattcacatggaaactgctacagttaaaagtacactagacccagaactgcttaatttgtttcacttattctcaaatgctgcatgctacatgccaaacaggtgagacagctggtcatgtacagtgacattgtctgtcatcatttgctcatatggggatacttaaacaattaaaaactgacaatggactcgcttatactagtcatgcttttcaaaatttcttatagctttgggctataacccataaaattggaattccttataatcctaaaggacaaggcattgtagagcaggcacattgaacattacaacacatgttgaaaagacgaaaggggtataggaggccaactaccacctcaatcaaaactacatttagccttatttacttcacatttttggactcctggtacagatggtaagactccagcagaaagacattggcaagtgttagaggaaaagaggaaagtttatctgaaagcattatggaaatccctggaaggacaatggaaaggttgggtggatttactgacgtggagaagagggtatgcttgtgttttcacaggagatggacaagccgtgtgggtgccctcaaggtgtgtgcaaccatggaatgggagactggaggaacccagggtggccaaccatgggtccggtccctctggtgtgagccatgagccagctgagcctgagtgcgaagacggagagaaggccgaccacagtcatgacatcaacccccataacctggggacaactcaagaaaaccacacaggaggctgagaaactactggagcaccagggacagtctgtaaagttggatggaccaccaatgggaaaatgagagctgcccaccctggccttacactccttcaattaatacataaacagaaaggaggatatacagagagccaaaggcccatgggacgtgaccaacattccactgagtctatacgatcaaacagcaaactgtttatcatgaatacagaatgtgggcaaactcatgactgtgcctgccccagaaggtttgctgagggcaattgcttcctgacgccaagctccttgaggttatctattgggacatccagagaatgcagtcttgcaagcctactctggaccgagcagctgaccccctcttccacttcccttcacactatctcttttgcctaataaatacggaaggctgtgtacaaggtcaggtcccttgtccactagaggcaaggtgcttcctgacccttcttccaaatataaaaaaaaaaaaaaaaaaaaaaaaaaaaaaaaaaaaaaaaaaaaaaaaaaaaaaaaaaaaaaaaaaaaaaaaaaaaaaaaaaaaaaaaaaaaaaaaa

SEQ ID NO: 6226 - protein, 109 aa, Homo sapien
MRAAHPGLTLLQLIHKQKGGYTESQRPMGRDQHSTESIRSNSKLFIMNTECGQTHDCACPRRFAEGNCFLTPSSLRLSIGTSRECSLASLLWTEQLTPSSTSLHTISFA

SEQ ID NO: 6227 - DNA, 2574 bp, Homo sapien
cagagccggcgcaggggaagcgcccggggccccgggtgcagcagcgcccgccgcctcccgggcctccccggcccgcagcccggggtcccgggccccggggccggcacctctcgggctccggctccccgcgcgcaagatggctgacccggctgcggggccgccgccgagcgagggcgaggagagcaccgtgcgcttcgcccgcaaaggcgccctccggcagaagaacgtgcatgaggtcaagaaccacaaattcaccgcccgcttcttcaagcagcccaccttctgcagccactgcaccgacttcatctggggcttcgggaagcagggattccagtgccaagtttgctgctttgtggtgcacaagcggtgccatgaatttgtcacattctcctgccctggcgctgacaagggtccagcctccgatgacccccgcagcaaacacaagtttaagatccacacgtactccagccccacgttttgtgaccactgtgggtcactgctgtatggactcatccaccaggggatgaaatgtgacacctgcatgatgaatgtgcacaagcgctgcgtgatgaatgttcccagcctgtgtggcacggaccacacggagcgccgcggccgcatctacatccaggcccacatcgacagggacgtcctcattgtcctcgtaagagatgctaaaaaccttgtacctatggaccccaatggcctgtcagatccctacgtaaaactgaaactgattcccgatcccaaaagtgagagcaaacagaagaccaaaaccatcaaatgctccctcaaccctgagtggaatgagacatttagatttcagctgaaagaatcggacaaagacagaagactgtcagtagagatttgggattgggatttgaccagcaggaatgacttcatgggatctttgtcctttgggatttctgaacttcagaaggccagtgttgatggctggtttaagttactgagccaggaggaaggcgagtacttcaatgtgcctgtgccaccagaaggaagtgaggccaatgaagaactgcggcagaaatttgagagggccaagatcagtcagggaaccaaggtcccggaagaaaagacgaccaacactgtctccaaatttgacaacaatggcaacagagaccggatgaaactgaccgattttaacttcctaatggtgctggggaaaggcagctttggcaaggtcatgctttcagaacgaaaaggcacagatgagctctatgctgtgaagatcctgaagaaggacgttgtgatccaagatgatgacgtggagtgcactatggtggagaagcgggtgttggccctgcctgggaagccgcccttcctgacccagctccactcctgcttccagaccatggaccgcctgtactttgtgatggagtacgtgaatgggggcgacctcatgtatcacatccagcaagtcggccggttcaaggagccccatgctgtattttacgctgcagaaattgccatcggtctgttcttcttacagagtaagggcatcatttaccgtgacctaaaacttgacaacgtgatgctcgattctgagggacacatcaagattgccgattttggcatgtgtaaggaaaacatctgggatggggtgacaaccaagacattctgtggcactccagactacatcgcccccgagataattgcttatcagccctatgggaagtccgtggattggtgggcatttggagtcctgctgtatgaaatgttggctgggcaggcaccctttgaaggggaggatgaagatgaactcttccaatccatcatggaacacaacgtagcctatcccaagtctatgtccaaggaagctgtggccatctgcaaagggctgatgaccaaacacccaggcaaacgtctgggttgtggacctgaaggcgaacgtgatatcaaagagcatgcatttttccggtatattgattgggagaaacttgaacgcaaagagatccagcccccttataagccaaaagctagagacaagagagacacctccaacttcgacaaagagttcaccagacagcctgtggaactgacccccactgataaactcttcatcatgaacttggaccaaaatgaatttgctggcttctcttatactaacccagagtttgtcattaatgtgtaggtgaatgcaaactccatcgttgagcctggggtgtaagacttcaagccaagcgtatgtatcaattctagtcttccaggattcacggtgcacatgctggcattcaacatgtggaaagcttgtcttagaggcctttcttgtatgtgtagcttgctagtttgttttctacatttgaaaatgtttagtttagaataagcgcattatccaattatagaggtacaattttccaaacttccagaaactcatcaaatgaacagacaatgtcaaaactactgtgtctgataccaaaatgcttcagtatttgtaatttttcaagtcagaagctgatgttcctggtaaaagtttttacagttattctataatatcttctttgaatgctaagcatgagcgatatttttaaaaattgtgagtaagcttcggaattc

SEQ ID NO: 6228 - protein, 671 aa, Homo sapien
MADPAAGPPPSEGEESTVRFARKGALRQKNVHEVKNHKFTARFFKQPTFCSHCTDFIWGFGKQGFQCQVCCFVVHKRCHEFVTFSCPGADKGPASDDPRSKHKFKIHTYSSPTFCDHCGSLLYGLIHQGMKCDTCMMNVHKRCVMNVPSLCGTDHTERRGRIYIQAHIDRDVLIVLVRDAKNLVPMDPNGLSDPYVKLKLIPDPKSESKQKTKTIKCSLNPEWNETFRFQLKESDKDRRLSVEIWDWDLTSRNDFMGSLSFGISELQKASVDGWFKLLSQEEGEYFNVPVPPEGSEANEELRQKFERAKISQGTKVPEEKTTNTVSKFDNNGNRDRMKLTDFNFLMVLGKGSFGKVMLSERKGTDELYAVKILKKDVVIQDDDVECTMVEKRVLALPGKPPFLTQLHSCFQTMDRLYFVMEYVNGGDLMYHIQQVGRFKEPHAVFYAAEIAIGLFFLQSKGIIYRDLKLDNVMLDSEGHIKIADFGMCKENIWDGVTTKTFCGTPDYIAPEIIAYQPYGKSVDWWAFGVLLYEMLAGQAPFEGEDEDELFQSIMEHNVAYPKSMSKEAVAICKGLMTKHPGKRLGCGPEGERDIKEHAFFRYIDWEKLERKEIQPPYKPKARDKRDTSNFDKEFTRQPVELTPTDKLFIMNLDQNEFAGFSYTNPEFVINV

SEQ ID NO: 6229 - DNA, 2808 bp, Homo sapien
gcggcggcggcggcgcagtttgctcatactttgtgacttgcggtcacagtggcattcagctccacacttggtagaaccacaggcacgacaagcatagaaacatcctaaacaatcttcatcgaggcatcgaggtccatcccaataaaaatcaggagaccctggctatcatagaccttagtcttcgctggtatactcgctgtctgtcaaccagcggttgactttttttaagccttcttttttctcttttaccagtttctggagcaaattcagtttgccttcctggatttgtaaattgtaatgacctcaaaactttagcagttcttccatctgactcaggtttgcttctctggcggtcttcagaatcaacatccacacttccgtgattatctgcgtgcattttggacaaagcttccaaccaggatacgggaagaagaaatggctggtgatctttcagcaggtttcttcatggaggaacttaatacataccgtcagaagcagggagtagtacttaaatatcaagaactgcctaattcaggacctccacatgataggaggtttacatttcaagttataatagatggaagagaatttccagaaggtgaaggtagatcaaagaaggaagcaaaaaatgccgcagccaaattagctgttgagatacttaataaggaaaagaaggcagttagtcctttattattgacaacaacgaattcttcagaaggattatccatggggaattacataggccttatcaatagaattgcccagaagaaaagactaactgtaaattatgaacagtgtgcatcgggggtgcatgggccagaaggatttcattataaatgcaaaatgggacagaaagaatatagtattggtacaggttctactaaacaggaagcaaaacaattggccgctaaacttgcatatcttcagatattatcagaagaaacctcagtgaaatctgactacctgtcctctggttcttttgctactacgtgtgagtcccaaagcaactctttagtgaccagcacactcgcttctgaatcatcatctgaaggtgacttctcagcagatacatcagagataaattctaacagtgacagtttaaacagttcttcgttgcttatgaatggtctcagaaataatcaaaggaaggcaaaaagatctttggcacccagatttgaccttcctgacatgaaagaaacaaagtatactgtggacaagaggtttggcatggattttaaagaaatagaattaattggctcaggtggatttggccaagttttcaaagcaaaacacagaattgacggaaagacttacgttattaaacgtgttaaatataataacgagaaggcggagcgtgaagtaaaagcattggcaaaacttgatcatgtaaatattgttcactacaatggctgttgggatggatttgattatgatcctgagaccagtgatgattctcttgagagcagtgattatgatcctgagaacagcaaaaatagttcaaggtcaaagactaagtgccttttcatccaaatggaattctgtgataaagggaccttggaacaatggattgaaaaaagaagaggcgagaaactagacaaagttttggctttggaactctttgaacaaataacaaaaggggtggattatatacattcaaaaaaattaattcatagagatcttaagccaagtaatatattcttagtagatacaaaacaagtaaagattggagactttggacttgtaacatctctgaaaaatgatggaaagcgaacaaggagtaagggaactttgcgatacatgagcccagaacagatttcttcgcaagactatggaaaggaagtggacctctacgctttggggctaattcttgctgaacttcttcatgtatgtgacactgcttttgaaacatcaaagtttttcacagacctacgggatggcatcatctcagatatatttgataaaaaagaaaaaactcttctacagaaattactctcaaagaaacctgaggatcgacctaacacatctgaaatactaaggaccttgactgtgtggaagaaaagcccagagaaaaatgaacgacacacatgttagagcccttctgaaaaagtatcctgcttctgatatgcagttttccttaaattatctaaaatctgctagggaatatcaatagatatttaccttttattttaatgtttcctttaattttttactatttttactaatctttctgcagaaacagaaaggttttcttctttttgcttcaaaaacattcttacattttactttttcctggctcatctctttattcttttttttttttttaaagacagagtctcgctctgttgcccaggctggagtgcaatgacacagtcttggctcactgcaacttctgcctcttgggttcaagtgattctcctgcctcagcctcctgagtagctggattacaggcatgtgccacccacccaactaatttttgtgtttttaataaagacagggtttcaccatgttggccaggctggtctcaaactcctgacctcaagtaatccacctgcctcggcctcccaaagtgctgggattacagggatgagccaccgcgcccagcctcatctctttgttctaaagatggaaaaaccacccccaaattttctttttatactattaatgaatcaatcaattcatatctatttattaaatttctaccgcttttaggccaaaaaaatgtaagatcgttctctgcctcacatagcttacaagccagctggagaaatatggtactcattaaaaaaaaaaaaaaagtgatgtacaacc

SEQ ID NO: 6230 - protein, 551 aa, Homo sapien
MAGDLSAGFFMEELNTYRQKQGVVLKYQELPNSGPPHDRRFTFQVIIDGREFPEGEGRSKKEAKNAAAKLAVEILNKEKKAVSPLLLTTTNSSEGLSMGNYIGLINRIAQKKRLTVNYEQCASGVHGPEGFHYKCKMGQKEYSIGTGSTKQEAKQLAAKLAYLQILSEETSVKSDYLSSGSFATTCESQSNSLVTSTLASESSSEGDFSADTSEINSNSDSLNSSSLLMNGLRNNQRKAKRSLAPRFDLPDMKETKYTVDKRFGMDFKEIELIGSGGFGQVFKAKHRIDGKTYVIKRVKYNNEKAEREVKALAKLDHVNIVHYNGCWDGFDYDPETSDDSLESSDYDPENSKNSSRSKTKCLFIQMEFCDKGTLEQWIEKRRGEKLDKVLALELFEQITKGVDYIHSKKLIHRDLKPSNIFLVDTKQVKIGDFGLVTSLKNDGKRTRSKGTLRYMSPEQISSQDYGKEVDLYALGLILAELLHVCDTAFETSKFFTDLRDGIISDIFDKKEKTLLQKLLSKKPEDRPNTSEILRTLTVWKKSPEKNERHTC

SEQ ID NO: 6231 - DNA, 2171 bp, Homo sapien
cgcgctatgtacgccctcttcctcctggccagcctcctgggcgcggctctagccggcccggtccttggactgaaagaatgcaccaggggctcggcagtgtggtgccagaatgtgaagacggcgtccgactgcggggcagtgaagcactgcctgcagaccgtttggaacaagccaacagtgaaatcccttccctgcgacatatgcaaagacgttgtcaccgcagctggtgatatgctgaaggacaatgccactgaggaggagatccttgtttacttggagaagacctgtgactggcttccgaaaccgaacatgtctgcttcatgcaaggagatagtggactcctacctccctgtcatcctggacatcattaaaggagaaatgagccgtcctggggaggtgtgctctgctctcaacctctgcgagtctctccagaagcacctagcagagctgaatcaccagaagcagctggagtccaataagatcccagagctggacatgactgaggtggtggcccccttcatggccaacatccctctcctcctctaccctcaggacggcccccgcagcaagccccagccaaaggataatggggacgtttgccaggactgcattcagatggtgactgacatccagactgctgtacggaccaactccacctttgtccaggccttggtggaacatgtcaaggaggagtgtgaccgcctgggccctggcatggccgacatatgcaagaactatatcagccagtattctgaaattgctatccagatgatgatgcacatgcaacccaaggagatctgtgcgctggttgggttctgtgatgaggtgaaagagatgcccatgcagactctggtccccgccaaagtggcctccaagaatgtcatccctgccctggaactggtggagcccattaagaagcacgaggtcccagcaaagtctgatgtttactgtgaggtgtgtgaattcctggtgaaggaggtgaccaagctgattgacaacaacaagactgagaaagaaatactcgacgcttttgacaaaatgtgctcgaagctgccgaagtccctgtcggaagagtgccaggaggtggtggacacgtacggcagctccatcctgtccatcctgctggaggaggtcagccctgagctggtgtgcagcatgctgcacctctgctctggcacgcggctgcctgcactgaccgttcacgtgactcagccaaaggacggtggcttctgcgaagtgtgcaagaagctggtgggttatttggatcgcaacctggagaaaaacagcaccaagcaggagatcctggctgctcttgagaaaggctgcagcttcctgccagacccttaccagaagcagtgtgatcagtttgtggcagagtacgagcccgtgctgatcgagatcctggtggaggtgatggatccttccttcgtgtgcttgaaaattggagcctgcccctcggcccataagcccttgttgggaactgagaagtgtatatggggcccaagctactggtgccagaacacagagacagcagcccagtgcaatgctgtcgagcattgcaaacgccatgtgtggaactaggaggaggaatattccatcttggcagaaaccacagcattggtttttttctacttgtgtgtctgggggaatgaacgcacagatctgtttgactttgttataaaaatagggctcccccacctcccccatttctgtgtcctttattgtagcattgctgtctgcaagggagcccctagcccctggcagacatagctgcttcagtgccccttttctctctgctagatggatgttgatgcactggaggtcttttagcctgcccttgcatggcgcctgctggaggaggagagagctctgctggcatgagccacagtttcttgactggaggccatcaaccctcttggttgaggccttgttctgagccctgacatgtgcttgggcactggtgggcctgggcttctgaggtggcctcctgccctgatcagggaccctccccgctttcctgggcctctcagttgaaccaaagcagcaaaacaaaggcagttttatatgaaagattagaagcctggaataatcaggctttttaaatgatgtaattcccactgtaatagcatagggattttggaagcagctgctggtggcttgggacatcagtg

SEQ ID NO: 6232 - protein, 524 aa, Homo sapien; identical to SEQ ID NO: 228

SEQ ID NO: 6233 - DNA, 2966 bp, Homo sapien
ggcacgaggatggaggagggaggccgggacaaggcgccggtgcagccccagcagtctccagcggcggcccccggcggcacggacgagaagccgagcggcaaggagcggcgggatgccggggacaaggacaaagaacaggagctgtctgaagaggataaacagcttcaagatgaactggagatgctcgtggaacgactaggggagaaggatacatccctgtatcgaccagcgctggaggaattgcgaaggcagattcgttcttctacaacttccatgacttcagtgcccaagcctctcaaatttctgcgtccacactatggcaaactgaaggaaatctatgagaacatggcccctggggagaataagcgttttgctgctgacatcatctccgttttggccatgaccatgagtggggagcgtgagtgcctcaagtatcggctagtgggctcccaggaggaattggcatcatggggtcatgagtatgtcaggcatctggcaggagaagtggctaaggagtggcaggagctggatgacgcagagaaggtccagcgggagcctctgctcactctggtgaaggaaatcgtcccctataacatggcccacaatgcagagcatgaggcttgcgacctgcttatggaaattgagcaggtggacatgctggagaaggacattgatgaaaatgcatatgcaaaggtctgcctttatctcaccagttgtgtgaattacgtgcctgagcctgagaactcagccctactgcgttgtgccctgggtgtgttccgaaagtttagccgcttccctgaagctctgagattggcattgatgctcaatgacatggagttggtagaagacatcttcacctcctgcaaggatgtggtagtacagaaacagatggcattcatgctaggccggcatggggtgttcctggagctgagtgaagatgtcgaggagtatgaggacctgacagagatcatgtccaatgtacagctcaacagcaacttcttggccttagctcgggagctggacatcatggagcccaaggtgcctgatgacatctacaaaacccacctagagaacaacaggtttgggggcagtggctctcaggtggactctgcccgcatgaacctggcctcctcttttgtgaatggctttgtgaatgcagcttttggccaagacaagctgctaacagatgatggcaacaaatggctttacaagaacaaggaccacggaatgttgagtgcagctgcatctcttgggatgattctgctgtgggatgtggatggtggcctcacccagattgacaagtacctgtactcctctgaggactacattaagtcaggagctcttcttgcctgtggcatagtgaactctggggtccggaatgagtgtgaccctgctctggcactgctctcagactatgttctccacaacagcaacaccatgagacttggttccatctttgggctaggcttggcttatgctggctcaaatcgtgaagatgtcctaacactgctgctgcctgtgatgggagattcaaagtccagcatggaggtggcaggtgtcacagctttagcctgtggaatgatagcagtagggtcctgcaatggagatgtaacttccactatccttcagaccatcatggagaagtcagagactgagctcaaggatacttatgctcgttggcttcctcttggactgggtctcaaccacctggggaagggtgaggccatcgaggcaatcctggctgcactggaggttgtgtcagagccattccgcagttttgccaacacactggtggatgtgtgtgcatatgcaggctctgggaatgtgctgaaggtgcagcagctgctccacatttgtagcgaacactttgactccaaagagaaggaggaagacaaagacaagaaggaaaagaaagacaaggacaagaaggaagcccctgctgacatgggagcacatcagggagtggctgttctggggattgcccttattgctatgggggaggagattggtgcagagatggcattacgaacctttggccacttgctgagatatggggagcctacactccggagggctgtacctttagcactggccctcatctctgtttcaaatccacgactcaacatcctggataccctaagcaaattctctcatgatgctgatccagaagtttcctattactccatttttgccatgggcatggtgggcagtggtaccaataatgcccgtctggctgcaatgctgcgccagttagctcaatatcatgccaaggacccaaacaacctcttcatggtgcgcttggcacagggcctgacacatttagggaagggcacccttaccctctgcccctaccacagcgaccggcagcttatgagccaggtggccgtggctggactgctcactgtgcttgtctctttcctggatgttcgaaacattattctaggcaaatcacactatgtattgtatgggctggtggctgccatgcagccccgaatgctggttacgtttgatgaggagctgcggccattgccagtgtctgtccgtgtgggccaggcagtggatgtggtgggccaggctggcaagccgaagactatcacagggttccagacgcatacaaccccagtgttgttggcccacggggaacgggcagaattggccactgaggagtttcttcctgttacccccattctggaaggttttgttatccttcggaagaaccccaattatgatctctaagtgaccaccaggggctctgaactgcagctgatgttatcagcaggccatgcatcctgctgccaagggtggacacggctgcagacttctgggggaattgtcgcctcctgctcttttgttactgagtgagataaggttgttcaataaagacttttatccccaaggtcaaaaaaaaaaaaaaaaaaaaaaaaaaaaaaaaaaaaaaaaaaaaaaaaaaaaaaaaaaaaaaaaaa

SEQ ID NO: 6234 - protein, 908 aa, Homo sapien
MEEGGRDKAPVQPQQSPAAAPGGTDEKPSGKERRDAGDKDKEQELSEEDKQLQDELEMLVERLGEKDTSLYRPALEELRRQIRSSTTSMTSVPKPLKFLRPHYGKLKEIYENMAPGENKRFAADIISVLAMTMSGERECLKYRLVGSQEELASWGHEYVRHLAGEVAKEWQELDDAEKVQREPLLTLVKEIVPYNMAHNAEHEACDLLMEIEQVDMLEKDIDENAYAKVCLYLTSCVNYVPEPENSALLRCALGVFRKFSRFPEALRLALMLNDMELVEDIFTSCKDVVVQKQMAFMLGRHGVFLELSEDVEEYEDLTEIMSNVQLNSNFLALARELDIMEPKVPDDIYKTHLENNRFGGSGSQVDSARMNLASSFVNGFVNAAFGQDKLLTDDGNKWLYKNKDHGMLSAAASLGMILLWDVDGGLTQIDKYLYSSEDYIKSGALLACGIVNSGVRNECDPALALLSDYVLHNSNTMRLGSIFGLGLAYAGSNREDVLTLLLPVMGDSKSSMEVAGVTALACGMIAVGSCNGDVTSTILQTIMEKSETELKDTYARWLPLGLGLNHLGKGEAIEAILAALEVVSEPFRSFANTLVDVCAYAGSGNVLKVQQLLHICSEHFDSKEKEEDKDKKEKKDKDKKEAPADMGAHQGVAVLGIALIAMGEEIGAEMALRTFGHLLRYGEPTLRRAVPLALALISVSNPRLNILDTLSKFSHDADPEVSYYSIFAMGMVGSGTNNARLAAMLRQLAQYHAKDPNNLFMVRLAQGLTHLGKGTLTLCPYHSDRQLMSQVAVAGLLTVLVSFLDVRNIILGKSHYVLYGLVAAMQPRMLVTFDEELRPLPVSVRVGQAVDVVGQAGKPKTITGFQTHTTPVLLAHGERAELATEEFLPVTPILEGFVILRKNPNYDL

SEQ ID NO: 6235 - DNA, 3318 bp, Homo sapien
gtgatgcgtagttccggctgccggttgacatgaagaagcagcagcggctagggcggcggtagctgcaggggtcggggattgcagcgggcctcggggctaagagcgcgacgcggcctagagcggcagacggcgcagtgggccgagaaggaggcgcagcagccgccctggcccgtcatggagatggaaaaggagttcgagcagatcgacaagtccgggagctgggcggccatttaccaggatatccgacatgaagccagtgacttcccatgtagagtggccaagcttcctaagaacaaaaaccgaaataggtacagagacgtcagtccctttgaccatagtcggattaaactacatcaagaagataatgactatatcaacgctagtttgataaaaatggaagaagcccaaaggagttacattcttacccagggccctttgcctaacacatgcggtcacttttgggagatggtgtgggagcagaaaagcaggggtgtcgtcatgctcaacagagtgatggagaaaggttcgttaaaatgcgcacaatactggccacaaaaagaagaaaaagagatgatctttgaagacacaaatttgaaattaacattgatctctgaagatatcaagtcatattatacagtgcgacagctagaattggaaaaccttacaacccaagaaactcgagagatcttacatttccactataccacatggcctgactttggagtccctgaatcaccagcctcattcttgaactttcttttcaaagtccgagagtcagggtcactcagcccggagcacgggcccgttgtggtgcactgcagtgcaggcatcggcaggtctggaaccttctgtctggctgatacctgcctcttgctgatggacaagaggaaagacccttcttccgttgatatcaagaaagtgctgttagaaatgaggaagtttcggatggggctgatccagacagccgaccagctgcgcttctcctacctggctgtgatcgaaggtgccaaattcatcatgggggactcttccgtgcaggatcagtggaaggagctttcccacgaggacctggagcccccacccgagcatatccccccacctccccggccacccaaacgaatcctggagccacacaatgggaaatgcagggagttcttcccaaatcaccagtgggtgaaggaagagacccaggaggataaagactgccccatcaaggaagaaaaaggaagccccttaaatgccgcaccctacggcatcgaaagcatgagtcaagacactgaagttagaagtcgggtcgtggggggaagtcttcgaggtgcccaggctgcctccccagccaaaggggagccgtcactgcccgagaaggacgaggaccatgcactgagttactggaagcccttcctggtcaacatgtgcgtggctacggtcctcacggccggcgcttacctctgctacaggttcctgttcaacagcaacacatagcctgaccctcctccactccacctccacccactgtccgcctctgcccgcagagcccacgcccgactagcaggcatgccgcggtaggtaagggccgccggaccgcgtagagagccgggccccggacggacgttggttctgcactaaaacccatcttccccggatgtgtgtctcacccctcatccttttactttttgccccttccactttgagtaccaaatccacaagccattttttgaggagagtgaaagagagtaccatgctggcggcgcagagggaaggggcctacacccgtcttggggctcgccccacccagggctccctcctggagcatcccaggcgggcggcacgccaacagccccccccttgaatctgcagggagcaactctccactccatatttatttaaacaattttttccccaaaggcatccatagtgcactagcattttcttgaaccaataatgtattaaaattttttgatgtcagccttgcatcaagggctttatcaaaaagtacaataataaatcctcaggtagtactgggaatggaaggctttgccatgggcctgctgcgtcagaccagtactgggaaggaggacggttgtaagcagttgttatttagtgatattgtgggtaacgtgagaagatagaacaatgctataatatataatgaacacgtgggtatttaataagaaacatgatgtgagattactttgtcccgcttattctcctccctgttatctgctagatctagttctcaatcactgctcccccgtgtgtattagaatgcatgtaaggtcttcttgtgtcctgatgaaaaatatgtgcttgaaatgagaaactttgatctctgcttactaatgtgccccatgtccaagtccaacctgcctgtgcatgacctgatcattacatggctgtggttcctaagcctgttgctgaagtcattgtcgctcagcaatagggtgcagttttccaggaataggcatttgcctaattcctggcatgacactctagtgacttcctggtgaggcccagcctgtcctggtacagcagggtcttgctgtaactcagacattccaagggtatgggaagccatattcacacctcacgctctggacatgatttagggaagcagggacaccccccgccccccacctttgggatcagcctccgccattccaagtcaacactcttcttgagcagaccgtgatttggaagagaggcacctgctggaaaccacacttcttgaaacagcctgggtgacggtcctttaggcagcctgccgccgtctctgtcccggttcaccttgccgagagaggcgcgtctgccccaccctcaaaccctgtggggcctgatggtgctcacgactcttcctgcaaagggaactgaagacctccacattaagtggctttttaacatgaaaaacacggcagctgtagctcccgagctactctcttgccagcattttcacattttgcctttctcgtggtagaagccagtacagagaaattctgtggtgggaacattcgaggtgtcaccctgcagagctatggtgaggtgtggataaggcttaggtgccaggctgtaagcattctgagctgggcttgttgtttttaagtcctgtatatgtatgtagtagtttgggtgtgtatatatagtagcatttcaaaatggacgtactggtttaacctcctatccttggagagcagctggctctccaccttgttacacattatgttagagaggtagcgagctgctctgctatatgccttaagccaatatttactcatcaggtcattattttttacaatggccatggaataaaccatttttacaaaa

SEQ ID NO: 6236 - protein, 435 aa, Homo sapien
MEMEKEFEQIDKSGSWAAIYQDIRHEASDFPCRVAKLPKNKNRNRYRDVSPFDHSRIKLHQEDNDYINASLIKMEEAQRSYILTQGPLPNTCGHFWEMVWEQKSRGVVMLNRVMEKGSLKCAQYWPQKEEKEMIFEDTNLKLTLISEDIKSYYTVRQLELENLTTQETREILHFHYTTWPDFGVPESPASFLNFLFKVRESGSLSPEHGPVVVHCSAGIGRSGTFCLADTCLLLMDKRKDPSSVDIKKVLLEMRKFRMGLIQTADQLRFSYLAVIEGAKFIMGDSSVQDQWKELSHEDLEPPPEHIPPPPRPPKRILEPHNGKCREFFPNHQWVKEETQEDKDCPIKEEKGSPLNAAPYGIESMSQDTEVRSRVVGGSLRGAQAASPAKGEPSLPEKDEDHALSYWKPFLVNMCVATVLTAGAYLCYRFLFNSNT

SEQ ID NO: 6237 - DNA, 2104 bp, Homo sapien
gctgttgtcgctcgctcagcgtctccctctcggccgccctctcctcgggacgatggcgcgcggtggccgcggccgccgcctggggttagccctggggctgctgctggcgctggtgctggcgccgcgggttctgcgggccaagcccacggtgcgcaaagagcgcgtggtgcggcccgactcggagctgggcgagcggccccctgaggacaaccagagcttccagtacgaccacgaggccttcctgggcaaggaggactccaagaccttcgaccagctcaccccggacgagagcaaggagaggctagggaagattgttgatcgaatcgacaatgatggggatggctttgtcactactgaggagctgaaaacctggatcaaacgggtgcagaaaagatacatctttgataatgtcgccaaagtctggaaggattatgatagggacaaggatgataaaatttcctgggaagaatacaaacaagccacctatggttactacctaggaaaccccgcagagtttcatgattcttcagatcatcacacctttaaaaagatgctgccacgtgatgagagaagattcaaagctgcagacctcaatggtgacctgacagctactcgggaggagttcactgcctttctgcatcctgaagagtttgaacatatgaaggaaattgtggttttggaaaccctggaggacatcgacaagaacggggatgggtttgtggatcaggatgagtatattgcggatatgttttcccatgaggagaatggccctgagccagactgggttttatcagaacgggagcagtttaacgaattccgggatctgaacaaggacgggaagttagacaaagatgagattcgccactggatcctccctcaagattatgatcacgcacaggctgaggccaggcatctggtatatgaatcagacaaaaacaaggatgagaagctaactaaagaggaaatattggagaactggaacatgtttgttggaagccaagctaccaattacggggaagatctcacaaaaaatcatgatgagctttgatagacactcaccagaatatggcagactgtcataggcattctgttattgtcttggattgttgctacaattgtctaattacagcagttgtgatcccacaaaaagcaagtttatacctcagattggggtataaaaattgtttttcgctcagtatttactggaaaatggacatcactagtctttcagtaagatttctctcaaaacacgtgaaaaccttggtaaattgcaattctttctggggatatattggtacaacatgacttaaaacttttttttttctattaaaacttaaaggggaacaaaacttgaaaaagccctgttcttcagaaggtgagtgggttgagggaggcagtaatatgaagtgactgctgtgtattttaactaccagatttttatatttgccactgttagatagttggaaaggggaaattctgtttaagcgaaagtggtatcatcctaggtaagcttatttcagaacaagtctaatatatcagattctttcttttcgactttatactctgagttattacttactgtaagtggtgtatatgaaacctccatgcattttccagtatggatctgctaatatgcacagtaaatccatgtctttgtttgtttttctattaagaagcaatcaagaaagataatgtgaaaaagaaaggaatttagaggtagggaaaagatgaatgtcagacatgtgaagaactatagtaaaaatgataaaccacctaaatatccttgaacctaccttaaaatgccaatgaggtaggcctgatctttgaatagtggctaggatacaatgcatttcctcagtgatcactgattagaatgagttggtgggatccttgggaagccaaacggagcggggttctggatcatgtcccatccagtccagtgaatccccgacccgcagacctgccccccccgcaacagcttataccatggaatgaggacaaggtgatactctgagctgtggactgaactggcagacacaacctgtacagattgaaatttcaccttgtaaggaggaagtgaatgaaataaaggatccccctaagg

SEQ ID NO: 6238 - protein, 331 aa, Homo sapien
MARGGRGRRLGLALGLLLALVLAPRVLRAKPTVRKERVVRPDSELGERPPEDNQSFQYDHEAFLGKEDSKTFDQLTPDESKERLGKIVDRIDNDGDGFVTTEELKTWIKRVQKRYIFDNVAKVWKDYDRDKDDKISWEEYKQATYGYYLGNPAEFHDSSDHHTFKKMLPRDERRFKAADLNGDLTATREEFTAFLHPEEFEHMKEIVVLETLEDIDKNGDGFVDQDEYIADMFSHEENGPEPDWVLSEREQFNEFRDLNKDGKLDKDEIRHWILPQDYDHAQAEARHLVYESDKNKDEKLTKEEILENWNMFVGSQATNYGEDLTKNHDEL

SEQ ID NO: 6239 - DNA, 1214 bp, Homo sapien
gcaaaactctgtcttacacaggatgacttggaattagagtccttatagcagaaagagcagcagggctgtccttgggtatccgttgctcagccaagtcatcaaataaaaaggatgattgcacaagtggactatgtaccaatctgtgggtttctgcatggccaagagccagaccctccctctgggctctgctggcccaacccaccaagggatgctttatttaaacagttccaagtaggggagaccagctgcccctgaaccccagaacaaccagctggatcagttctcacaggagctacagcgcggagactgggtaagtcaacgatccccagagctgggacagaaggggcagcaatggggcagcaactgagggagaagagagctgacgttagtgcttaggagacgttgcacactttgcagacaggaagtaaaggaaatgggaccccagagtggccgcagaggggcctgtggggtaagacactacagtgtgtgtcataaccaagacccgatcagggagtagttacttctcttcttttcttacaggaaacatggttccaaaactgttcacttcccaaatttgtctgcttcttctgttggggcttctggctgtggagggctcactccatgtcaaacctccacagtttacctgggctcaatggtttgaaacccagcacatcaatatgacctcccagcaatgcaccaatgcaatgcaggtcattaacaattatcaacggcgatgcaaaaaccaaaatactttccttcttacaacttttgctaacgtagttaatgtttgtggtaacccaaatatgacctgtcctagtaacaaaactcgcaaaaactgtcaccacagtggaagccaggtgcctttaatccactgtaacctcacaactccaagtccacagaatatttcaaactgcaggtatgcgcagacaccagcaaacatgttctatatagttgcatgtgacaacagagatcaacgacgagaccctccacagtatccggtggttccagttcacctggatagaatcatctaagctcctgtatcagcactcctcatcatcactcatctgccaagctcctcaatcatagccaagatcccatctctccatatactttgggtatcagcatctgtcctcatcagtctccataccccttcagctttcctgagctgaagtgccttgtgaaccctgcaataaactgctttgcaaattcatctg

SEQ ID NO: 6240 - protein, 161 aa, Homo sapien; identical to SEQ ID NO: 1725

SEQ ID NO: 6241 - DNA, 225 bp, Homo sapien
gcatcacttgctgctgacacgccgaccgcctgctgcttcagctacacctcccggcagattccacagaatttcatagctgactactttgagacgagcagccagtgctccaagcccggtgtcatcttcctaaccaagcgaagccggcaggtctgtgctgaccccagtgaggagtgggtccagaaatatgtcagcgacctggagctgagtgcctgaggggtccagaag

SEQ ID NO: 6242 - DNA, 637 bp, Homo sapien
cttctgagttctgcagcctcacctctgagaaaacctcttttcgaccaataccatgaagctctgcgtgactgtcctgtctctcctcatgctagtagctgccttctgctctccagcgctctcagcaccaatgggctcagaccctcccaccgcctgctgcttttcttacaccgcgaggaagcttcctcgcaactttgtggtagattactatgagaccagcagcctctgctcccagccagctgtggtattccaaaccaaaagaagcaagcaagtctgtgctgatcccagtgaatcctgggtccaggagtacgtgtatgacctggaactgaactgagctgctcagagacaggaagtcttcagggaaggtcacctgagcccggatgcttctccatgagacacatctcctccatactcaggactcctctccgcagttcctgtcccttctcttaatttaatcttttttatgtgccgtgttattgtattaggtgtcatttccattatttatattagtttagccaaaggataagtgtcccctatggggatggtccactgtcactgtttctctgctgttgcaaatacatggataacacatttgattctgtgtgttttcataataaaactttaaaataaaatgcagaat

SEQ ID NO: 6243 - protein, 92 aa, Homo sapien; identical to SEQ ID NO: 1259

SEQ ID NO: 6244 - DNA, 2918 bp, Homo sapien; identical to SEQ ID NO: 1928

SEQ ID NO: 6245 - protein, 93 aa, Homo sapien; identical to SEQ ID NO: 1929

SEQ ID NO: 6246 - DNA, 2000 bp, Homo sapien
attttcctggggctccggggcgcggagaagctgcatcccagaggagcgcgtccaggagcggacccgggagtgtttcaagagccagtgacaaggaccaggggcccaagtcccaccagccatgcagacctgccccctggcattccctggccacgtttcccaggcccttgggaccctcctgtttttggctgcctccttgagtgctcagaatgaaggctgggacagccccatctgcacagagggggtagtctctgtgtcttggggcgagaacaccgtcatgtcctgcaacatctccaacgccttctcccatgtcaacatcaagctgcgtgcccacgggcaggagagcgccatcttcaatgaggtggctccaggctacttctcccgggacggctggcagctccaggttcagggaggcgtggcacagctggtgatcaaaggcgcccgggactcccatgctgggctgtacatgtggcacctcgtgggacaccagagaaataacagacaagtcacgctggaggtttcaggtgcagaaccccagtccgcccctgacactgggttctggcctgtgccagcggtggtcactgctgtcttcatcctcttggtcgctctggtcatgttcgcctggtacaggtgccgctgttcccagcaacgccgggagaagaagttcttcctcctagaaccccagatgaaggtcgcagccctcagagcgggagcccagcagggcctgagcagagcctccgctgaactgtggaccccagactccgagcccaccccaaggccgctggcactggtgttcaaaccctcaccacttggagccctggagctgctgtccccccaacccttgtttccatatgccgcagacccatagccgcctgcaaggcagagaggacacaggagagccagccctgagtgccgaccttgggtggcggggcctgggtctctcgtcccacccggagggcacagacaccggcttgcttggcaggctgggcctctgtgtcacccactcctgggtgcgtgcagacccttcccctccaccccccaggtcttccaagctctgcttcctcagtttccaaaatggaaccacctcacctccgcagcacccgacttaccaggacgcatgcccctccctctgccctcatcaaacccacagacccggactccctttctgccaccccaggctggtccggccccaggtgtggggtccgctctctccactcccagggctccgcgcccaagtgagggggcccctgccggagcctcagacacactggagttcagggctgggggggccttggcacatacctgtcccttggctatgagcaggctttgggggcccttccgcggcagccccgggggccgaggtagggtctgggggcttagaggctgggatggctcctggccccaccgccagggggcaagcgcaggccgggctgggaggcggcggcggcggctcgggctggggggtcaggtggacgctgcctccggggctggtcgcgcatccctcagtccctcggccacccgggggtcgctccctcgtgcccaccgcacctgccgagcctctttggacccagatctgttcatgcttttgtcttcgtcactgcggcggggccctttgatgtcttcatctgtatggggtggaaaaatcaccgggaatcccccttcagttctttgaaaaagttccatgactcgaatatctgaaatgaagaaaacaaaccgactcacaaacctccaagtagctccaaatgcaatttttaaaatggaaaacaaaaatctgaaagaaacgtctttagtggctttaagccccaaaacgtccctaaggcgtcctcgagatgaagacgggggggagcccccagccaggtggagaccccgcaggacgcggcggcgcccggtgaccgaggcctcgcacagccggccgccctgagggtcgggccggagccagggtccaagaggggcgcgtttgtgtctcgggttaaaataaggttccgtccgcgtgctgggtcaga

SEQ ID NO: 6247 - protein, 248 aa, Homo sapien
MQTCPLAFPGHVSQALGTLLFLAASLSAQNEGWDSPICTEGVVSVSWGENTVMSCNISNAFSHVNIKLRAHGQESAIFNEVAPGYFSRDGWQLQVQGGVAQLVIKGARDSHAGLYMWHLVGHQRNNRQVTLEVSGAEPQSAPDTGFWPVPAVVTAVFILLVALVMFAWYRCRCSQQRREKKFFLLEPQMKVAALRAGAQQGLSRASAELWTPDSEPTPRPLALVFKPSPLGALELLSPQPLFPYAADP

SEQ ID NO: 6248 - DNA, 1789 bp, Homo sapien; identical to SEQ ID NO: 1736

SEQ ID NO: 6249 - protein, 335 aa, Homo sapien; identical to SEQ ID NO: 1737

SEQ ID NO: 6250 - DNA, 2578 bp, Homo sapien
tctacacttaaaatgccaccagcagttggaggtccagttggatacacccccccagatggaggctggggctgggcagtggtaattggagctttcatttccatcggcttctcttatgcatttcccaaatcaattactgtcttcttcaaagagattgaaggtatattccatgccaccaccagcgaagtgtcatggatatcctccataatgttggctgtcatgtatggtggaggtcctatcagcagtatcctggtgaataaatatggaagtcgtatagtcatgattgttggtggctgcttgtcaggctgtggcttgattgcagcttctttctgtaacaccgtacagcaactatacgtctgtattggagtcattggaggtcttgggcttgccttcaacttgaatccagctctgaccatgattggcaagtatttctacaagaggcgaccattggccaacggactggccatggcaggcagccctgtgttcctctgtactctggcccccctcaatcaggttttcttcggtatctttggatggagaggaagctttctaattcttgggggcttgctactaaactgctgtgttgctggagccctcatgcgaccaatcgggcccaagccaaccaaggcagggaaagataagtctaaagcatcccttgagaaagctggaaaatctggtgtgaaaaaagatctgcatgatgcaaatacagatcttattggaagacaccctaaacaagagaaacgatcagtcttccaaacaattaatcagttcctggacttaaccctattcacccacagaggctttttgctatacctctctggaaatgtgatcatgttttttggactctttgcacctttggtgtttcttagtagttatgggaagagtcagcattattctagtgagaagtctgccttccttctttccattctggcttttgttgacatggtagcccgaccatctatgggacttgtagccaacacaaagccaataagacctcgaattcagtatttctttgcggcttccgttgttgcaaatggagtgtgtcatatgctagcacctttatccactacctatgttggattctgtgtctatgcgggattctttggatttgccttcgggtggctcagctccgtattgtttgaaacattgatggaccttgttggaccccagaggttctccagcgctgtgggattggtgaccattgtggaatgctgtcctgtcctcctggggccaccacttttaggtcggctcaatgacatgtatggagactacaaatacacatactgggcatgtggcgtcgtcctaattatttcaggtatctatctcttcattggcatgggcatcaattatcgacttttggcaaaagaacagaaagcaaacgagcagaaaaaggaaagtaaagaggaagagaccagtatagatgttgctgggaagccaaatgaagttaccaaaacagcagaatctccggaccagaaagacacagaaggagggcccaaggaggaggaaagtccagtctgaatccatggggctgaagggtaaattgagcagttcatgacccaggatatctgaaaatattctactggcctgtaatctaccagtggtgctcaatgcaaatagtagacatttgtgtggaaatcataccagttgttcattgatgggatttttgtttgactccttaccaatagcctgaatttgaggagggaatgattggtagcaaaggatgggggaaagaagtaggttctgttttgttttgttttaatcttagcttttaatagtgtcataaagattataatatgtgccttaagttttagtctttagaactctagagagccttaacttcttaaaccatttttgctgaattcatctatttcgagtgttgtgttaaaaggaaaaataacaactaacttgtttgaggcaaatctaaaatttaaaattaatcttgcttcattgttacatgtaatatatttcagacattttcactggaagatttatgaacagaaatattggttgaaagttagagattttacaaaatgctgacaaaaatattttcctagcatcagtagatttctggcatatgtttctgctagctatatatttaggaaattcaaagcataaaactttggcaacatcttggctgttctagacacagtgtacttgtcaacccctctcaggtaccttttcttgggatgcttattagaagccaagtaaagtgcttaaggtttgttttcattaaattagctatttctgctcccctgttcaaagatgcattttgagtgtttatagatcactgccctttttgaaatcacctggtattatttttcttactggaaaagttagtattaaaatctacagaactacatatttgtgcctccttggtaaatacaacacatctaattaaatgtagacagatatttcaaacatcagctgaattcacttaagtttttccaaaacctcagttaaactgtgaagctattggaatttttttttcctggaatttttcccctttgattcacagtggtcccatttatatctgcttctagcttagtgctatgtgtgagatatgtgtgtgtttggtgttttt

SEQ ID NO: 6251 - protein, 500 aa, Homo sapien
MPPAVGGPVGYTPPDGGWGWAVVIGAFISIGFSYAFPKSITVFFKEIEGIFHATTSEVSWISSIMLAVMYGGGPISSILVNKYGSRIVMIVGGCLSGCGLIAASFCNTVQQLYVCIGVIGGLGLAFNLNPALTMIGKYFYKRRPLANGLAMAGSPVFLCTLAPLNQVFFGIFGWRGSFLILGGLLLNCCVAGALMRPIGPKPTKAGKDKSKASLEKAGKSGVKKDLHDANTDLIGRHPKQEKRSVFQTINQFLDLTLFTHRGFLLYLSGNVIMFFGLFAPLVFLSSYGKSQHYSSEKSAFLLSILAFVDMVARPSMGLVANTKPIRPRIQYFFAASVVANGVCHMLAPLSTTYVGFCVYAGFFGFAFGWLSSVLFETLMDLVGPQRFSSAVGLVTIVECCPVLLGPPLLGRLNDMYGDYKYTYWACGVVLIISGIYLFIGMGINYRLLAKEQKANEQKKESKEEETSIDVAGKPNEVTKTAESPDQKDTEGGPKEEESPV

SEQ ID NO: 6252 - DNA, 6840 bp, Homo sapien
ccggcccagcggctctcctggcctcgcgctgcacattctctcctggcggcggcgccacctgcagtagcgttcgcccgaacatggcgacacggagcagcaggagggagtcgcgactcccgttcctattcaccctggtcgcactgctgccgcccggagctctctgcgaagtctggacgcagaggctgcacggcggcagcgcgcccttgccccaggaccggggcttcctcgtggtgcagggcgacccgcgcgagctgcggctgtgggcgcgcggggatgccaggggggcgagccgcgcggacgagaagccgctccggaggaaacggagcgctgccctgcagcccgagcccatcaaggtgtacggacaggttagtctgaatgattcccacaatcagatggtggtgcactgggctggagagaaaagcaacgtgatcgtggccttggcccgagatagcctggcattggcgaggcccaagagcagtgatgtgtacgtgtcttacgactatggaaaatcattcaagaaaatttcagacaagttaaactttggcttgggaaataggagtgaagctgttatcgcccagttctaccacagccctgcggacaacaagcggtacatctttgcagacgcttatgcccagtacctctggatcacgtttgacttctgcaacactcttcaaggcttttccatcccatttcgggcagctgatctcctcctacacagtaaggcctccaaccttctcttgggctttgacaggtcccaccccaacaagcagctgtggaagtcagatgactttggccagacctggatcatgattcaggaacatgtcaagtccttttcttggggaattgatccctatgacaaaccaaataccatctacattgaacgacacgaaccctctggctactccactgtcttccgaagtacagatttcttccagtcccgggaaaaccaggaagtgatccttgaggaagtgagagattttcagcttcgggacaagtacatgtttgctacaaaggtggtgcatctcttgggcagtgaacagcagtcttctgtccagctctgggtctcctttggccggaagcccatgagagcagcccagtttgtcacaagacatcctattaatgaatattacatcgcagatgcctccgaggaccaggtgtttgtgtgtgtcagccacagtaacaaccgcaccaatttatacatctcagaggcagaggggctgaagttctccctgtccttggagaacgtgctctattacagcccaggaggggccggcagtgacaccttggtgaggtattttgcaaatgaaccatttgctgacttccaccgagtggaaggattgcaaggagtctacattgctactctgattaatggttctatgaatgaggagaacatgagatcggtcatcacctttgacaaagggggaacctgggagtttcttcaggctccagccttcacgggatatggagagaaaatcaattgtgagctttcccagggctgttcccttcatctggctcagcgcctcagtcagctcctcaacctccagctccggagaatgcccatcctgtccaaggagtcggctccaggcctcatcatcgccactggctcagtgggaaagaacttggctagcaagacaaacgtgtacatctctagcagtgctggagccaggtggcgagaggcacttcctggacctcactactacacatggggagaccacggcggaatcatcacggccattgcccagggcatggaaaccaacgagctaaaatacagtaccaatgaaggggagacctggaaaacattcatcttctctgagaagccagtgtttgtgtatggcctcctcacagaacctggggagaagagcactgtcttcaccatctttggctcgaacaaagagaatgtccacagctggctgatcctccaggtcaatgccacggatgccttgggagttccctgcacagagaatgactacaagctgtggtcaccatctgatgagcgggggaatgagtgtttgctgggacacaagactgttttcaaacggcggaccccccatgccacatgcttcaatggagaggactttgacaggccggtggtcgtgtccaactgctcctgcacccgggaggactatgagtgtgacttcggtttcaagatgagtgaagatttgtcattagaggtttgtgttccagatccggaattttctggaaagtcatactcccctcctgtgccttgccctgtgggttctacttacaggagaacgagaggctaccggaagatttctggggacacttgtagcggaggagatgttgaagcgcgactggaaggagagctggtcccctgtcccctggcagaagagaacgagttcattctgtatgctgtgaggaaatccatctaccgctatgacctggcctcgggagccaccgagcagttgcctctcaccgggctacgggcagcagtggccctggactttgactatgagcacaactgtttgtattggtccgacctggccttggacgtcatccagcgcctctgtttgaatggaagcacagggcaagaggtgatcatcaattctggcctggagacagtagaagctttggcttttgaacccctcagccagctgctttactgggtagatgcaggcttcaaaaagattgaggtagctaatccagatggcgacttccgactcacaatcgtcaattcctctgtgcttgatcgtcccagggctctggtcctcgtgccccaagagggggtgatgttctggacagactggggagacctgaagcctgggatttatcggagcaatatggatggttctgctgcctatcacctggtgtctgaggatgtgaagtggcccaatggcatctctgtggacgaccagtggatttactggacggatgcctacctggagtgcatagagcggatcacgttcagtggccagcagcgctctgtcattctggacaacctcccgcacccctatgccattgctgtctttaagaatgaaatctactgggatgactggtcacagctcagcatattccgagcttccaaatacagtgggtcccagatggagattctggcaaaccagctcacggggctcatggacatgaagattttctacaaggggaagaacactggaagcaatgcctgtgtgcccaggccatgcagcctgctgtgcctgcccaaggccaacaacagtagaagctgcaggtgtccagaggatgtgtccagcagtgtgcttccatcaggggacctgatgtgtgactgccctcagggctatcagctcaagaacaatacctgtgtcaaagaagagaacacctgtcttcgcaaccagtatcgctgcagcaacgggaactgtatcaacagcatttggtggtgtgactttgacaacgactgtggagacatgagcgatgagagaaactgccctaccaccatctgtgacctggacacccagtttcgttgccaggagtctgggacttgtatcccactgtcctataaatgtgaccttgaggatgactgtggagacaacagtgatgaaagtcattgtgaaatgcaccagtgccggagtgacgagtacaactgcagttccggcatgtgcatccgctcctcctgggtatgtgacggggacaacgactgcagggactggtctgatgaagccaactgtaccgccatctatcacacctgtgaggcctccaacttccagtgccgaaacgggcactgcatcccccagcggtgggcgtgtgacggggatacggactgccaggatggttccgatgaggatccagtcaactgtgagaagaagtgcaatggattccgctgcccaaacggcacttgcatcccatccagcaaacattgtgatggtctgcgtgattgctctgatggctccgatgaacagcactgcgagcccctctgtacgcacttcatggactttgtgtgtaagaaccgccagcagtgcctgttccactccatggtctgtgacggaatcatccagtgccgcgacgggtccgatgaggatgcggcgtttgcaggatgctcccaagatcctgagttccacaaggtatgtgatgagttcggtttccagtgtcagaatggagtgtgcatcagtttgatttggaagtgcgacgggatggatgattgcggcgattattctgatgaagccaactgcgaaaaccccacagaagccccaaactgctcccgctacttccagtttcggtgtgagaatggccactgcatccccaacagatggaaatgtgacagggagaacgactgtggggactggtctgatgagaaggattgtggagattcacatattcttcccttctcgactcctgggccctccacgtgtctgcccaattactaccgctgcagcagtgggacctgcgtgatggacacctgggtgtgcgacgggtaccgagattgtgcagatggctctgacgaggaagcctgccccttgcttgcaaacgtcactgctgcctccactcccacccaacttgggcgatgtgaccgatttgagttcgaatgccaccaaccgaagacgtgtattcccaactggaagcgctgtgacggccaccaagattgccaggatggccgggacgaggccaattgccccacacacagcaccttgacttgcatgagcagggagttccagtgcgaggacggggaggcctgcattgtgctctcggagcgctgcgacggcttcctggactgctcggacgagagcgatgaaaaggcctgcagtgatgagttgactgtgtacaaagtacagaatcttcagtggacagctgacttctctggggatgtgactttgacctggatgaggcccaaaaaaatgccctctgcatcttgtgtatataatgtctactacagggtggttggagagagcatatggaagactctggagacccacagcaataagacaaacactgtattaaaagtcttgaaaccagataccacgtatcaggttaaagtacaggttcagtgtctcagcaaggcacacaacaccaatgactttgtgaccctgaggaccccagagggattgccagatgcccctcgaaatctccagctgtcactccccagggaagcagaaggtgtgattgtaggccactgggctcctcccatccacacccatggcctcatccgtgagtacattgtagaatacagcaggagtggttccaagatgtgggcctcccagagggctgctagtaactttacagaaatcaagaacttattggtcaacactctatacaccgtcagagtggctgcggtgactagtcgtggaataggaaactggagcgattctaaatccattaccaccataaaaggaaaagtgatcccaccaccagatatccacattgacagctatggtgaaaattatctaagcttcaccctgaccatggagagtgatatcaaggtgaatggctatgtggtgaaccttttctgggcatttgacacccacaagcaagagaggagaactttgaacttccgaggaagcatattgtcacacaaagttggcaatctgacagctcatacatcctatgagatttctgcctgggccaagactgacttgggggatagccctctggcatttgagcatgttatgaccagaggggttcgcccacctgcacctagcctcaaggccaaagccatcaaccagactgcagtggaatgtacctggaccggcccccggaatgtggtttatggtattttctatgccacgtcctttcttgacctctatcgcaacccgaagagcttgactacttcactccacaacaagacggtcattgtcagtaaggatgagcagtatttgtttctggtccgtgtagtggtaccctaccaggggccatcctctgactacgttgtagtgaagatgatcccggacagcaggcttccaccccgtcacctgcatgtggttcatacgggcaaaacctccgtggtcatcaagtgggaatcaccgtatgactctcctgaccaggacttgttgtatgcaattgcagtcaaagatctcataagaaagactgacaggagctacaaagtaaaatcccgtaacagcactgtggaatacacccttaacaagttggagcctggcgggaaataccacatcattgtccaactggggaacatgagcaaagattccagcataaaaattaccacagtttcattatcagcacctgatgccttaaaaatcataacagaaaatgatcatgttcttctgttttggaaaagcctggctttaaaggaaaagcattttaatgaaagcaggggctatgagatacacatgtttgatagtgccatgaatatcacagcttaccttgggaatactactgacaatttctttaaaatttccaacctgaagatgggtcataattacacgttcaccgtccaagcaagatgcctttttggcaaccagatctgtggggagcctgccatcctgctgtacgatgagctggggtctggtgcagatgcatctgcaacgcaggctgccagatctacggatgttgctgctgtggtggtgcccatcttattcctgatactgctgagcctgggggtggggtttgccatcctgtacacgaagcaccggaggctgcagagcagcttcaccgccttcgccaacagccactacagctccaggctggggtccgcaatcttctcctctggggatgacctgggggaagatgatgaagatgcccctatgataactggattttcagatgacgtccccatggtgatagcctgaaagagctttcctcactagaaaccaaatggtgtaaatattttatttgataaagatagttgatggtttattttaaaagatgcactttgagttgcaatatgttatttttatatgggcc

SEQ ID NO: 6253 - protein, 2214 aa, Homo sapien; identical to SEQ ID NO: 5266

SEQ ID NO: 6254 - DNA, 2326 bp, Homo sapien
ccatcctaatacgactcactatagggctcgagcggccgcccgggcaggtacgccctatacaacttggcttcacatacttttacactaactttatatgatttttaaaaactggtctgatcggacttctcgtcctgggacactgtttactggagtctggccggctctccgtgctcctcttggtacctcattttggggagaaccttaaacccactcgagcagataatctccgccttgaccggtgccaccaaagaagggttggaaccatgtggacttttctgggcattgccactttcacctatttttataagaagttcggggacttcatcactttggccaacagggaggtcctgttgtgcgtgctggtgttcctctcgctgggcctggtgctctcctaccgctgtcgccaccgaaacgggggtctcctcgggcgccagcggagcggctcccagttcgccctcttctcggatattctctcaggcctgcctttcattggcttcttctgggccaaatccccccctgaatcagaaaataaggagcagctcggggccaggaggcgcagaaaaggaaccaatatttcagaaacaagcttaataggaacagctgcctgtacatcaacatcttctcagaatgacccagaagttatcatcgtgggagctggcgtgcttggctctgctttggtagctgtgctttccagagatggaagaaaggtgacagtcattgagagagacttaaaagagcctgacagaatagttggagaattcctgcagccgggtggttatcatgttctcaaagaccttggtcttggagatacagtggaaggtcttgatgcccaggttgtaaatggttacatgattcatgatcaggaaagcaaatcagaggttcagattccttaccctctgtcagaaaacaatcaagtgcagagtggaagagctttccatcacggaagattcatcatgagtctccggaaagcagctatggcagagcccaatgcaaagtttattgaaggtgttgtgttacagttattagaggaagatgatgttgtgatgggagttcagtacaaggataaagagactggagatatcaaggaactccatgctccactgactgttgttgcagatgggcttttctccaagttcaggaaaagcctggtctccaataaagtttctgtatcatctcattttgttggctttcttatgaagaatgcaccacagtttaaagcaaatcatgctgaacttattttagctaacccgagtccagttctcatctaccggatttcatccagtgaaactcgagtacttgttgacattagaggagaaatgccaaggaatttaagagaatacatggttgaaaaaatttacccacaaatacctgatcacctgaaagaaccattcttagaagccactgacaattctcatctgaggtccatgctagcaagcttccttcctccttcatcagtgaagaaacgaggtgttcttcttttgggagacgcatataatatgaggcatccacttactggtggaggaatgactgttgcttttaaagatataaaactatggagaaaactgctaaagggtatccctgacctttatgatgatgcagctattttcgaggccaacaaatcattttactgggcaagaaaaacatctcattcctttgtcgtgaatatccttgctcaggctctttatgaattattttctgccacagatgattccctgcatcaactaagaaaagcctgttttctttatttcaaacttggtggcgaatgtgttgcgggtcctgttgggctgctttctgtattgtctcctaaccctctagctttaattggacacttctttgctgttgcaatctatgccgtgtatttttgctttaagtcagaaccttggattacaaaacctcgagcccttctcagtagtagtgctgtattgtacaaagcgtgttctgtaatatttcctctaatttactcagaaatgaagtatatggttcattaagcttaaaggggaaccatttgtgaatgaatatttggaacttaccaagtcctaagagacttttggaagaggatatatatagcatagtaccataccacttataaagtggaaactcttggaccaagatttggattaatttgtttttgaagttttttgtatataaatatgtaaatacatgctttaatttgcaatttaaaatgaaggggttaaataagttagacatttgaaagaaatgattgttaccataaattagtgctaatgctgaggagaactacagtttttcttttgaatttagtatttgagatgagttgttgggacatgcaaataaaatgaagaatgac

SEQ ID NO: 6255 - protein, 574 aa, Homo sapien; identical to SEQ ID NO: 2198

SEQ ID NO: 6256 - DNA, 424 bp, Homo sapien
ctggctagacaatatcatcgaccttgtgaaaaagtacatcctggccctttggaacgaagggtacatcatgggctttatcagtaaggagcgggagcgggccatcttgagcactaagcctccaggcaccttcctgctaagattcagtgaaagcagcaaagaaggaggcgtcactttcacttgggtggagaaggacatcagcggtaagacccagatccagtccgtggaaccatacacaaagcagcagctgaacaacatgtcatttgctgaaatcatcatgggctataagatcatggatgctaccaatatcctggtgtctccactggtctatctctatcctgacattcccaaggaggaggcattcggaaagtattgtcggccagagagccaggagcatcctgaagctgacccaggtagcgctgcccca

SEQ ID NO: 6257 - DNA, 2910 bp, Homo sapien; identical to SEQ ID NO: 1578

SEQ ID NO: 6258 - protein, 268 aa, Homo sapien; identical to SEQ ID NO: 1579

SEQ ID NO: 6259 - DNA, 5010 bp, Homo sapien; identical to SEQ ID NO: 1862

SEQ ID NO: 6260 - protein, 760 aa, Homo sapien; identical to SEQ ID NO: 1863

SEQ ID NO: 6261 - DNA, 4208 bp, Homo sapien; identical to SEQ ID NO: 1422

SEQ ID NO: 6262 - protein, 849 aa, Homo sapien; identical to SEQ ID NO: 1423

SEQ ID NO: 6263 - DNA, 1998 bp, Homo sapien; identical to SEQ ID NO: 1274

SEQ ID NO: 6264 - protein, 399 aa, Homo sapien; identical to SEQ ID NO: 1275

SEQ ID NO: 6265 - DNA, 3645 bp, Homo sapien
gaattcgggcgccgcccgcccggcagtcaggcagcgtcgccgccgtggtagcagcctcagccgtttctggagtctcgggcccacagtcaccgccgcttacctgcgcctcctcgagcctccggagtccccgtccgcccgcacaggccggttcgccgtctgcgtctcccccacgccgcctcgcctgccgccgcgctcgtccctccgggccgacatgagtggggaccacctccacaacgattcccagatcgaagcggatttccgattgaatgattctcataaacacaaagataaacacaaagatcgagaacaccggcacaaagaacacaagaaggagaaggaccgggaaaagtccaagcatagcaacagtgaacataaagattctgaaaagaaacacaaagagaaggagaagaccaaacacaaagatggaagctcagaaaagcataaagacaaacataaagacagagacaaggaaaaacgaaaagaggaaaaggttcgagcctctggggatgcaaaaataaagaaggagaaggaaaatggcttctctagtccaccacaaattaaagatgaacctgaagatgatggctattttgttcctcctaaagaggatataaagccattaaagagacctcgagatgaggatgatgttgattataaacctaagaaaattaaaacagaagataccaagaaggagaagaaaagaaaactagaagaagaagaggatggtaaattgaaaaaacccaagaataaagataaagataaaaaagttcctgagccagataacaagaaaaagaagccgaagaaagaagaggaacagaagtggaaatggtgggaagaagagcgctatcctgaaggcatcaagtggaaattcctagaacataaaggtccagtatttgccccaccatatgagcctcttccagagaatgtcaagttttattatgatggtaaagtcatgaagctgagccccaaagcagaggaagtagctacgttctttgcaaaaatgctcgaccatgaatatactaccaaggaaatatttaggaaaaatttctttaaagactggagaaaggaaatgactaatgaagagaagaatattatcaccaacctaagcaaatgtgattttacccagatgagccagtatttcaaagcccagacggaagctcggaaacagatgagcaaggaagagaaactgaaaatcaaagaggagaatgaaaaattactgaaagaatatggattctgtattatggataaccacaaagagaggattgctaacttcaagatagagcctcctggacttttccgtggccgcggcaaccaccccaagatgggcatgctgaagagacgaatcatgcccgaggatataatcatcaactgtagcaaagatgccaaggttccttctcctcctccaggacataagtggaaagaagtccggcatgataacaaggttacttggctggtttcctggacagagaacatccaaggttccattaaatacatcatgcttaaccctagttcacgaatcaagggtgagaaggactggcagaaatacgagactgctcggcggctgaaaaaatgtgtggacaagatccggaaccagtatcgagaagactggaagtccaaagagatgaaagtccggcagagagctgtagccctgtacttcatcgacaagcttgctctgagagcaggcaatgaaaaggaggaaggagaaacagcggacactgtgggctgctgctcacttcgtgtggagcacatcaatctacacccagagttggatggtcaggaatatgtggtagagtttgacttcctcgggaaggactccatcagatactataacaaggtccctgttgagaaacgagtttttaagaacctacaactatttatggagaacaagcagcccgaggatgatctttttgatagactcaatactggtattctgaataagcatcttcaggatctcatggagggcttgacagccaaggtattccgtacgtacaatgcctccatcacgctacagcagcagctaaaagaactgacagccccggatgagaacatcccagcgaagatcctttcttataaccgtgccaatcgagctgttgcaattctttgtaaccatcagagggcaccaccaaaaacttttgagaagtctatgatgaacttgcaaactaagattgatgccaagaaggaacagctagcagatgcccggagagacctgaaaagtgctaaggctgatgccaaggtcatgaaggatgcaaagacgaagaaggtagtagagtcaaagaagaaggctgttcagagactggaggaacagttgatgaagctggaagttcaagccacagaccgagaggaaaataaacagattgccctgggaacctccaaactcaattatctggaccctaggatcacagtggcttggtgcaagaagtggggtgtcccaattgagaagatttacaacaaaacccagcgggagaagtttgcctgggccattgacatggctgatgaagactatgagttttagccagtctcaagaggcagagttctgtgaagaggaacagtgtggtttgggaaagatggataaactgagcctcacttgccctcgtgcctgggggagagaggcagcaagtcttaacaaaccaacatctttgcgaaaagataaacctggagatattataagggagagctgagccagttgtcctatggacaacttatttaaaaatatttcagatatcaaaattctagctgtatgatttgttttgaattttgtttttattttcaagagggcaagtggatgggaatttgtcagcgttctaccaggcaaattcactgtttcactgaaatgtttggattctcttagctactgtatgcaaagtccgattatattggtgcgtttttacagttagggttttgcaataacttctatattttaatagaaataaattcctaaactcccttccctctctcccatttcaggaatttaaaattaagtagaacaaaaaacccagcgcacctgttagagtcgtcactctctattgtcatggggatcaattttcattaaacttgaagcagtcgtggctttggcagtgttttggttcagacacctgttcacagaaaaagcatgatgggaaaatatttcctgacttgagtgttcctttttaaatgtgaattttttttttttttaattattttaaaatatttaaacctttttcttgatcttaaagatcgtgtagattggggttggggagggatgaagggcgagtgaatctaaggataatgaaataatcagtgactgaaaccattttcccatcatcctttgttctgagcattcgctgtaccctttaagatatccatctttttctttttaaccctaatctttcacttgaaagattttattgtataaaaagtttcacaggtcaataaacttagaggaaaatgagtatttggtccaaaaaaaggaaaaataatcaagattttagggcttttattttttcttttgtaattgtgtaaaaaatggaaaaaaacataaaaagcagaattttaatgtgaagacattttttgctataatcattagttttagaggcattgttagtttagtgtgtgtgcagagtccatttcccacatctttcctcaagtatcttctatttttatcatgaattc

SEQ ID NO: 6266 - protein, 765 aa, Homo sapien [sequence omitted]

SEQ ID NO: 6267 - DNA, 1335 bp, Mus musculus
ggcacgaggtagaaaccatgaaaaaattagatattgttttgtgacttttagacagtggtaaatatagaaccatgaattctggtcacattccatttctctccaacatgaaggatcaaaaaatgtttttcaatgtgttctttgttccactggaaacttagagtcatgagtttatgagctgatttggtcaccttcctctgcctttgttcactgtgagttctgatgtcttagtgacttagttcttagaagctcacgccttagtttgaaacagattctccacggtggtccccaaaacactgtctgcatatccataagaattgagcgctatgggtgttaacgtgcatgaggatcagtttgcagcagcaagtacaaaaggagaagaggaacatccgttgaatgagtgtgttttgtacataacttcagatacttgtgaacatgccttatatttgtccaacaactgtcagaataaagaacattctaaaatgagaaaaaaaaacaggacccgtcgccatgggccgtgtgatccgtggacagaggaagggcgccgggtctgtgttccgcgcgcacgtgaagcaccgtaaaggcgctgcgcgcctgcgcgccgtggatttcgctgagcggcacggctacatcaagggcatcgtcaaggacatcatccacgacccgggccgcggcgcgcccctcgccaaggtggtcttccgggatccgtatcggtttaagaagcggacggagctgttcattgccgccgagggcattcacacgggccagtttgtgtattgcggcaagaaggcccagctcaacattggcaatgtgctccctgtgggcaccatgcctgagggtacaatcgtgtgctgcctggaggagaagcctggagaccgtggcaagctggcccgggcatcagggaactatgccaccgttatctcccacaaccctgagaccaagaagacccgtgtgaagctgccctccggctccaagaaggttatctcctcagccaacagagctgtggttggtgtggtggctggaggtggccgaattgacaaacccatcttgaaggctggccgggcgtaccacaaatataaggcaaagaggaactgctggccacgagtacggggtgtggccatgaatcctgtggagcatccttttggaggtggcaaccaccagcacatcggcaagccctccaccatccgcagagatgcccctgctggccgcaaagtgggtctcattgctgcccgccggactggacgtctccggggaaccaagactgtgcaggagaaagagaactagtgctgagggcctcaataaagtttgtgtttatgccacaaaaaaaaaaaaaaaaaa

SEQ ID NO: 6268 - protein, 257 aa, Mus musculus [sequence omitted]

SEQ ID NO: 6269 - DNA, 255 bp, Homo sapien
gtgaagcagatcgagagcaagactgcttttcaggaagccttggacgctgcaggtgataaacttgtagtagttgacttctcagccacgtggtgtgggccttgcaaaatgatcaagcctttctttcatgatgttgcttcagagtgtgaagtcaaatgcatgccaacattccagttttttaagaagggacaaaaggtgggtgaattttctggagccaataaggaaaagcttgaagccaccattaatgaattagtctag

SEQ ID NO: 6270 - DNA, 3877 bp, Homo sapien
cgctgcgccacatcccaccggcccttacactgtggtgtccagcagcatccggcttcatggggggacttgaaccctgcagcaggctcctgctcctgcctctcctgctggctgtaagtggtgagttaggggcttccgtggctgcctcccgggtccctgggctcagcttggggcagggcagggagtggggtggaacgagagaaccaaaagtgggtgttgggatgggagcaggtccccaacctcccaaagcctgtgggtttctcccagagcccaagcccccaagttttgtcgtccgctacaagcaggggagaagagacatctaagtgtgttgccacaggacaagttgtgcagaagtaacgcacatagtccggtggcccagacgccagccccctgagtcccgccagacacgctctcccccttgctaacctcttggctgtcaggatccaccttccctggcttctaaacttgcctcccccacccccgtcataactctgtgcctcagtttaccttctttttcctcctcaggtctccgtcctgtccaggcccaggcccagagcggtaggcctagacccagcagtccctctctctacctcccagagacctccctgtctccgtctctcccacaccctttccaaacctccctgccgctgacccccctccccacagttcccagcacacactgacctcccctgacccctgtgctgcagattgcagttgctctacggtgagcccgggcgtgctggcagggatcgtgatgggagacctggtgctgacagtgctcattgccctggccgtgtacttcctgggccggctggtccctcgggggcgaggggctgcggagggtgagtggggctagcaggggacatcctgaggacttgcctagatgggggtggggggctgggtaaactcccagatctcaaacatccaaagggatggtaatggaggtgctgatttggaatgacaaaacaccctcaactcaccactctgcctgtctctgcaccccacaacacccctcacctccagcagcgacccggaaacagcgtatcactgagaccgagtcgccttatcaggtgagaaaaccagactgtcctcctcacatttcactcctgccagggatatctgccccagatactccttcatgccatcagagggacctcaaagccactctgcctaaagcacccccaaaccttgaaggcacatgggacatctgtccaaaactgggccgaatgatcaaccacaagcttatggtcagcttaaaatgtgtgaagaggggctgggcacggtgactcaaacctgtaatcccagcactttgggagacagaggcgggtggatcacttgaggtcaggagttcgagaccaacatggtgaaaccctgtctctactaaaaatacaaaattagctgggcgtggtaacgcatgcctgtaatcccagctacttgggaggctgaggcaggagaatcctttgacccaggaggcggaggttgcagtgagccaagatcacgcaattgcactccagcctgggcaacaagaggaaaactctgtcaaaaaaaaaaaagcgtgaagagttaaaaagaaaaaaaaaagggtggctttgcctttgtaagtgtaaacacaggccttgccagaagtcaggccaggaattttctggaagaaacccagccctaggacgactgatttctgggagacgctctcagtagggcagagaatgtcattcagccctaccttggtaactctaaagagaggagtcctagaatctcttttttgggtttgaggacccttcatccctttgagaaactaagaaaatctagactcccagaaaaatctacacaaaaaatacaaaattgtgcatataatctgagagcagtgtaaatgttctttataattaaaaaaaatttttttttggccaggcatggtggcacacacctgtaatcccagcactttgggaggccaaggtgggtggatcacgaggtcaggagttcaagaccagccaggccaggatggtgaaaccccatctctactaaaaatacaaaaattagctgggcatggtgtcatgcgcctgtaattccagcttctcaggaggctgaggcaagagaatcgcttgaacccagggggcggaggttgcagtgagcctgggcgacagagtgagactccatctcaaaaaaaaaaaaaagacaggggtctcactatgttgccccagctggtctcaaactcccagtctcaagtgatcctcccgcctcagcctccgaaaatcttgggattacaggctcaagcaaccatgctggttgagtattcttgaagctcttttttctttctctactttaatttttttttttttttgagatggagtctcattctgtcacccaggctggagtgcaatggtgtggtctcagctcactgcaacctccacctcccaggttcaagcgattctcttgcctgagcctcccgagtagctggaactacaggtgcatgccaccacacccggctaatttttgtatttttagtagagatggggtttcactatgttggccaggctggtctcaatctcctgacctcgtgatccgcccacctttccctcccaaagtgctgggattagaggtgtgagccaccgcgcccggccttaattttttttttttttttaaagtagagataggttctcactatgttgcccaggctggtctcaaactcctgggctcaagagatcctgttacctcggtctcccaaagtgctgggattataggcatgagtcaccatgcctggctgaagctctttttaaaaactatagagtatacaagagaatctagtcatctatccccctctctgtcaatgttcctttttaaccctttagggggtcatgagattctctaagacctctcccctgaagaatgcacgcccagactagtcatcatatatgattttagggtttctgtctgaggcctgcccctgggggccacatagatcctccccctaccccaagtgtgaacactgctgtgtgaagtctgatatattgtctgcaaccagctttgcctattcacctcacttgtggataaagtttctttgtgaagtctaagaatctcaggtttggctctgtgatatccagaagaccgaggggcccttccagttactggtggcagtgaaattttagggcaaagcattacccggatgtatttattccctctgtggatgtgtctagcacctataagtgctaaatgctggggacacagtgacagagtttatatcctagttaagacaaacttaaagcaaatgaacaaataaaataattttgggaggcacagtaaaggaaataaacaggcttttttttttttttttacagtggctggagtgtggggggaagaaactacagaggggaaattgagaaatgcctctctgaggaggtgacgtgagctgagacttgaagggagaggggatctaggggaacagagttttaggcagaggaaacagcacacgcagggaccctgaggctggggcacactgatgaggcagaggagaagggggaacattgaatgtacttgaataaaatccggatctctttcatggctataaggctgaagaagctgccaggggccttgcaggccactgggagaaggctggattttatttggtgggtcccttccactgatggcccccattcctttaggagctccagggtcagaggtcggatgtctacagcgacctcaacacacagaggccgtattacaaatgagcccgaatcatgacagtcagcaacatgatacctggatccagccattcctgaagcccaccctgcacctcattccaactcctaccgcgatacagacccacagagtgccatccctgagagaccagaccgctccccaatactctcctaaaataaacatgaagcac

SEQ ID NO: 6271 - DNA, 930 bp, Homo sapien
atggttgggttcaaggccacagatgtgccccctactgccactgtgaagtttcttggggctggcacagctgcctgcatcgcagatctcatcacctttcctctggatactgctaaagtccggttacagatccaaggagaaagtcaggggccagtgcgcgctacagccagcgcccagtaccgcggtgtgatgggcaccattctgaccatggtgcgtactgagggcccccgaagcctctacaatgggctggttgccggcctgcagcgccaaatgagctttgcctctgtccgcatcggcctgtatgattctgtcaaacagttctacaccaagggctctgagcatgccagcattgggagccgcctcctagcaggcagcaccacaggtgccctggctgtggctgtggcccagcccacggatgtggtaaaggtccgattccaagctcaggcccgggctggaggtggtcggagataccaaagcaccgtcaatgcctacaagaccattgcccgagaggaagggttccggggcctctggaaagggacctctcccaatgttgctcgtaatgccattgtcaactgtgctgagctggtgacctatgacctcatcaaggatgccctcctgaaagccaacctcatgacagatgacctcccttgccacttcatttctgcctttggggcaggcttctgcaccactgtcatcgcctcccctgtagacgtggtcaagacgagatacatgaactctgccctgggccagtacagtagcgctggccactgtgcccttaccatgctccagaaggaggggccccgagccttctacaaagggttcatgccctcctttctccgcttgggttcctggaacgtggtgatgttcgtcacctatgagcagctgaaacgagccctcatggctgcctgcacttcccgagaggctcccttctga

SEQ ID NO: 6272 - protein, 309 aa, Homo sapien [sequence omitted]

SEQ ID NO: 6273 - DNA, 2062 bp, Homo sapien
ctcccagcccgtctccccgctccagtttagaacctaattcccaattcccggaccgggcccagccctgggctcttactgtccgcttttgctgggacctgttccacaaatgggcgtcttctgccttgggccgtgggggttgggccggaagctgcggacgcctgggaaggggccgctgcagctcttgagccgcctctgcggggaccacttgcaggccatcccagccaagaaggccccggctgggcaggaggagcctgggacgccgccctcctcgccgctgagtgccgagcagttggaccggatccagaggaacaaggccgcggccctgctcagactcgcggcccgcaacgtgcccgtgggctttggagagagctggaagaagcacctcagcggggagttcgggaaaccgtattttatcaagctaatgggatttgttgcagaagaaagaaagcattacactgtttatccacccccacaccaagtcttcacctggacccagatgtgtgacataaaagatgtgaaggttgtcatcctgggacaggatccatatcatggacctaatcaagctcacgggctctgctttagtgttcaaaggcctgttccgcctccgcccagtttggagaacatttataaagagttgtctacagacatagaggattttgttcatcctggccatggagatttatctgggtgggccaagcaaggtgttctccttctcaacgctgtcctcacggttcgtgcccatcaagccaactctcataaggagcgaggctgggagcagttcactgatgcagttgtgtcctggctaaatcagaactcgaatggccttgttttcttgctctggggctcttatgctcagaagaagggcagtgccattgataggaagcggcaccatgtactacagacggctcatccctcccctttgtcagtgtatagagggttctttggatgtagacacttttcaaagaccaatgagctgctgcagaagtctggcaagaagcccattgactggaaggagctgtgatcatcagctgaggggtggcctttgagaagctgctgttaacgtatttgccagttacgaagttccactgaaaattttcctattaattcttaagtactctgcataagggggaaaagcttccagaaagcagccatgaaccaggctgtccaggaatggcagctgtatccaaccacaaacaacaaaggctaccctttgaccaaatgtctttctctgcaacatggcttcggcctaaaatatgcagaagacagatgaggtcaaatactcagttggctctctttatctcccttgcctttatggtgaaacaggggagatgtgcacctttcaggcacagccctagtttggcgcctgctgctccttggttttgcctggttagactttcagtgacagatgttggggtgtttttgcttagaaaggtccccttgtctcagccttgcagggcaggcatgccagtctctgccagttccactgcccccttgatctttgaaggagtcctcaggcccctcgcagcataaggatgttttgcaactttccagaatctggcccagaaattagggctcaatttcctgattgtagtagaggttaagattgctgtgagctttatcagataagagaccgagagaagtaagctgggtcttgttattccttgggtgttggtggaataagcagtggaatttgaacaaggaagaggagaaaagggaattttgtctttatggggtggggtgattttctcctagggttatgtccagttggggtttttaaggcagcacagactgccaagtactgttttttttaaccgactgaaatcactttgggatattttttcctgcaacactggaaagttttagttttttaagaagtactcatgcagatatatatatatatatttttcccagtcctttttttaagagacggtctttattgggtctgcacctccatccttgatcttgttagcaatgctgtttttgctgttagtcgggttagagttggctctacgcgaggtttgttaataaaagtttgttaaaagttcaaaaaaaaaaaaaaaaa

SEQ ID NO: 6274 - protein, 304 aa, Homo sapien
MGVFCLGPWGLGRKLRTPGKGPLQLLSRLCGDHLQAIPAKKAPAGQEEPGTPPSSPLSAEQLDRIQRNKAAALLRLAARNVPVGFGESWKKHLSGEFGKPYFIKLMGFVAEERKHYTVYPPPHQVFTWTQMCDIKDVKVVILGQDPYHGPNQAHGLCFSVQRPVPPPPSLENIYKELSTDIEDFVHPGHGDLSGWAKQGVLLLNAVLTVRAHQANSHKERGWEQFTDAVVSWLNQNSNGLVFLLWGSYAQKKGSAIDRKRHHVLQTAHPSPLSVYRGFFGCRHFSKTNELLQKSGKKPIDWKEL

SEQ ID NO: 6275 - DNA, 1806 bp, Homo sapien; identical to SEQ ID NO: 2659

SEQ ID NO: 6276 - protein, 283 aa, Homo sapien; identical to SEQ ID NO: 2660

SEQ ID NO: 6277 - DNA, 3355 bp, Homo sapien
acatacttcttcctccttcggaagggctggtaacttgttgagcggacggaacggcggcggcggcggcaccatccaggcgggcaccatgggcacgtccgcgctctgggcgctctggctgctgctcgcgctgtgctgggcgccccgggagagcggcgccaccggaaccgggagaaaagccaaatgtgaaccctcccaattccagtgcacaaatggtcgctgtattacgctgttgtggaaatgtgatggggatgaagactgtgttgacggcagtgatgaaaagaactgtgtaaagaagacgtgtgctgaatctgacttcgtgtgcaacaatggccagtgtgttcccagccgatggaagtgtgatggagatcctgactgcgaagatggttcagatgaaagcccagaacagtgccatatgagaacatgccgcatacatgaaatcagctgtggcgcccattctactcagtgtatcccagtgtcctggagatgtgatggtgaaaatgattgtgacagtggagaagatgaagaaaactgtggcaatataacatgtagtcccgacgagttcacctgctccagtggccgctgcatctccaggaactttgtttgcaatggccaggatgactgcagcgatggcagtgatgagctggactgtgccccgccaacctgtggcgcccatgagttccagtgcagcacctcctcctgcatccccatcagctgggtatgcgacgatgatgcagactgctccgaccaatctgatgagtccctggagcagtgtggccgtcagccagtcatacacaccaagtgtccagccagcgaaatccagtgcggctctggcgagtgcatccataagaagtggcgatgtgatggggaccctgactgcaaggatggcagtgatgaggtcaactgtccctctcgaacttgccgacctgaccaatttgaatgtgaggatggcagctgcatccatggcagcaggcagtgtaatggtatccgagactgtgtcgatggttccgatgaagtcaactgcaaaaatgtcaatcagtgcttgggccctggaaaattcaagtgcagaagtggagaatgcatagatatcagcaaagtatgtaaccaggagcaggactgcagggactggagtgatgagcccctgaaagagtgtcatataaacgaatgcttggtaaataatggtggatgttctcatatctgcaaagacctagttataggctacgagtgtgactgtgcagctgggtttgaactgatagataggaaaacctgtggagatattgatgaatgccaaaatccaggaatctgcagtcaaatttgtatcaacttaaaaggcggttacaagtgtgaatgtagtcgtggctatcaaatggatcttgctactggcgtgtgcaaggcagtaggcaaagagccaagtctgatcttcactaatcgaagagacatcaggaagattggcttagagaggaaagaatatatccaactagttgaacagctaagaaacactgtggctctcgatgctgacattgctgcccagaaactattctgggccgatctaagccaaaaggctatcttcagtgcctcaattgatgacaaggttggtagacatgttaaaatgatcgacaatgtctataatcctgcagccattgctgttgattgggtgtacaagaccatctactggactgatgcggcttctaagactatttcagtagctaccctagatggaaccaagaggaagttcctgtttaactctgacttgcgagagcctgcctccatagctgtggacccactgtctggctttgtttactggtcagactggggtgaaccagctaaaatagaaaaagcaggaatgaatggattcgatagacgtccactggtgacagcggatatccagtggcctaacggaattacacttgaccttataaaaagtcgcctctattggcttgattctaagttgcacatgttatccagcgtggacttgaatggccaagatcgtaggatagtactaaagtctctggagttcctagctcatcctcttgcactaacaatatttgaggatcgtgtctactggatagatggggaaaatgaagcagtctatggtgccaataaattcactggatcagagctagccactctagtcaacaacctgaatgatgcccaagacatcattgtctatcatgaacttgtacagccatcaggtaaaaattggtgtgaagaagacatggagaatggaggatgtgaatacctatgcctgccagcaccacaaattaatgatcactctccaaaatatacctgttcctgtcccagtgggtacaatgtagaggaaaatggccgagactgtcaaagtactgcaactacwgtgacttacagtgagacaaaagatacgaacacaacagaaatttcagcaactagtggactagttcctggagggatcaatgtgaccacagcagtatcagaggtcagtgttcccccaaaagggacttctgccgcatgggccattcttcctctcttgctcttagtgatggcagcagtaggtggctacttgatgtggcggaattggcaacacaagaacatgaaaagcatgaactttgacaatcctgtgtacttgaaaaccactgaagaggacctctccatagacattggtagacacagtgcttctgttggacacacgtacccagcaatatcagttgtaagcacagatgatgatctagcttgacttctgtgacaaatgttgacctttgaggtctaaacaaataatacccccgtcggaatggtaaccgagccagcagctgaagtctctttttcttcctctcggctggaagaacatcaagatacctttgcgtggatcaagcttgtgtacttgaccgtttttatattacttttgtaaatattcttgtccacattctacttcagctttggatgtggttaccgagtatctgtaacccttgaatttctagacagtattgccacctctggccaaatatgcactttccctagaaagccatattccagcagtgaaacttgtgctatagtgtataccacctgtacatacattgtataggccatctgtaaatatcccagagaacaatcactattcttaagcactttgaaaatatttctatgtaaattattgtaaactttttcaatggttgggacaatggcaataggacaaaacgggttactaagatgaaattgccaaaaaaatttataaactaattttgtacgtatgaatgatatctttgacctcaatggaggtttgcaaagactgagtgttcaaactactgtacatttttttcaagtgctaaaaaaattaaaccagcagcttaaaaaaaaaaaaaaaaaaaaaaaaaaaaaaaaaaaaaaa

SEQ ID NO: 6278 - protein, 873 aa, Homo sapien
MGTSALWALWLLLALCWAPRESGATGTGRKAKCEPSQFQCTNGRCITLLWKCDGDEDCVDGSDEKNCVKKTCAESDFVCNNGQCVPSRWKCDGDPDCEDGSDESPEQCHMRTCRIHEISCGAHSTQCIPVSWRCDGENDCDSGEDEENCGNITCSPDEFTCSSGRCISRNFVCNGQDDCSDGSDELDCAPPTCGAHEFQCSTSSCIPISWVCDDDADCSDQSDESLEQCGRQPVIHTKCPASEIQCGSGECIHKKWRCDGDPDCKDGSDEVNCPSRTCRPDQFECEDGSCIHGSRQCNGIRDCVDGSDEVNCKNVNQCLGPGKFKCRSGECIDISKVCNQEQDCRDWSDEPLKECHINECLVNNGGCSHICKDLVIGYECDCAAGFELIDRKTCGDIDECQNPGICSQICINLKGGYKCECSRGYQMDLATGVCKAVGKEPSLIFTNRRDIRKIGLERKEYIQLVEQLRNTVALDADIAAQKLFWADLSQKAIFSASIDDKVGRHVKMIDNVYNPAAIAVDWVYKTIYWTDAASKTISVATLDGTKRKFLFNSDLREPASIAVDPLSGFVYWSDWGEPAKIEKAGMNGFDRRPLVTADIQWPNGITLDLIKSRLYWLDSKLHMLSSVDLNGQDRRIVLKSLEFLAHPLALTIFEDRVYWIDGENEAVYGANKFTGSELATLVNNLNDAQDIIVYHELVQPSGKNWCEEDMENGGCEYLCLPAPQINDHSPKYTCSCPSGYNVEENGRDCQSTATTVTYSETKDTNTTEISATSGLVPGGINVTTAVSEVSVPPKGTSAAWAILPLLLLVMAAVGGYLMWRNWQHKNMKSMNFDNPVYLKTTEEDLSIDIGRHSASVGHTYPAISVVSTDDDLA

SEQ ID NO: 6279 - DNA, 3002 bp, Homo sapien
gcactggccagacccagccagggatcctcgtattcgtcgagcctaatttccagcagccgggtaggcctcaccagaggctcctttccgtgaggccgcccccaattcctgcccctattctctgcctgggagatggcttccccgagccccccgccggagtcgaaggaggagtgggattatctggacccagctcagagaagcctgtataaagatgtcatgatggagaattatggaaacctggtctcactggatgttttgaacagagataaggatgaggagccaactgtaaaacaagagattgaagaaattgaggaagaagtggaaccacagggtgtaatagttacaagaatcaaaagtgaaattgaccaggatcctatgggtagagaaacatttgaacttgttggtaggttagataaacaaagagggatcttcctatgggaaataccaagggaatctttgacccaggaacagagaatgttcagagaaaacactaacattatccgtaaaagaccaaactcagaagagaaatgccataaatgtgaagaatgtggaaagggttttgtccgcaaggcccatttcattcaacatcaaagggtccatactggtgagaaaccttttcagtgcaatgaatgtgggaaaagttttagtcgcagttcatttgttattgaacatcagagaattcacactggggaaaggccctatgagtgtaattactgtggaaaaacctttagtgtgagctcaacccttattagacatcagagaatccacactggagaaagaccctatcagtgtaatcagtgtaaacagagcttcagccagagaaggagccttgttaaacatcaaaggattcatacaggtgagaaaccccataaatgtagtgactgtgggaaagccttcagttggaaatcacaccttattgagcatcaaagaactcacactggtgagaaaccttatcactgtaccaaatgtaagaagagctttagtcgaaattcattgcttgttgagcatcaaagaattcacactggggaaagaccccataaatgtggtgaatgtgggaaagcctttcgattaagcacataccttatacaacaccaaaaaattcacactggcgagaagccttttctttgtattgagtgtggaaaaagtttcagtcggagctcattccttattgaacatcagaggatccatactggtgaaagaccttatcagtgcaaagagtgtgggaaaagtttcagtcagctttgcaaccttactcgtcatcagagaattcacacaggagacaagccccataaatgtgaggaatgtggaaaagcctttagtagaagctcaggtcttattcagcatcagagaattcacaccagggagaagacttatccatacaatgaaactaaggaaagttttgatccaaattgcagtcttgttatacagcaggaagtctaccctaaggagaaatcttataaatgtgatgaatgtgggaaaacttttagtgttagtgctcatcttgtacaacatcaaagaatccacactggtgaaaagccctatctatgtactgtctgtgggaagagcttcagccggagctcatttcttattgaacatcagagaatccacactggagagagaccctatctgtgcagacagtgtggaaaaagctttagtcagctttgtaatcttattcgacatcagggtgttcacacaggtaataaaccccataaatgtgatgaatgtggaaaggcctttagccggaactcgggtcttattcagcatcagagaatacacacaggagagaaaccttataagtgtgagaagtgcgacaaaagtttcagtcaacagcgcagtcttgtcaaccatcagatgatccatgcagaggtgaaaacccaagaaacccatgaatgtgatgcttgtggtgaagcctttaattgccgtatttctcttattcagcatcagaaattgcacacagcatggatgcaataaatgtagagcaatacataagctcaatttgatttgagactagtacccaagtgcagttttagtatggctcaacatggatcagatttagtgataaagcaaattctccttgggcctcaggcaaatagtttctaaagattctgtgaatagtggacaactgcccatgagcatttgacttcccttactctttgatgatcgtagagaaagacttggtaatttatctaagtatctttaataaatctttcagcagagagattaaacctaggttcagagcatgggtgctctgagggacaaagttggattagtataagggagctggagcagctgatagtggaaaacagaataatgattcaaagagtcttctgtcaccatgtcatattgtgggtctttcagttccatgatatgtttggctctgcatgccaaagtcccagtgattaagcatatataagttgtcaaggaaacaaagcccaaatgtttttaaaacaagtatacagtttttgtcattgtttaagaaagccatttgtttggcatgtgagttaaaggcagttccaatgcctgatggttccccagatctatgaaatgggtggaccattaaccttacatgtaaagattatgttagtaattaagaaaccctaacaaaggtgttaccaaggaacctttgggagtgccttttttgtttttcaagatggacccaaaaaaagtggaggaagatattgttcttttgtgccctcctacctgtgagagatatttgtagtcctatgtgaatgagcttatccctccacaaccaggtgcatatgaaagtgtacatattatgactgccaagtattggaaatgaaaagacctggagtctatgctaggaagctgagatattttggtattgcattggtttttatggtaactaggttttgcatgcaattaaaaatccttatttcttgttctagggcttcccttagttaatggttattataaacctattaattcatctgttttaaccattaaaacctgttttgtttttcgctttgaaaaaaaaaaaaaaaaaa

SEQ ID NO: 6280 - protein, 612 aa, Homo sapien
MASPSPPPESKEEWDYLDPAQRSLYKDVMMENYGNLVSLDVLNRDKDEEPTVKQEIEEIEEEVEPQGVIVTRIKSEIDQDPMGRETFELVGRLDKQRGIFLWEIPRESLTQEQRMFRENTNIIRKRPNSEEKCHKCEECGKGFVRKAHFIQHQRVHTGEKPFQCNECGKSFSRSSFVIEHQRIHTGERPYECNYCGKTFSVSSTLIRHQRIHTGERPYQCNQCKQSFSQRRSLVKHQRIHTGEKPHKCSDCGKAFSWKSHLIEHQRTHTGEKPYHCTKCKKSFSRNSLLVEHQRIHTGERPHKCGECGKAFRLSTYLIQHQKIHTGEKPFLCIECGKSFSRSSFLIEHQRIHTGERPYQCKECGKSFSQLCNLTRHQRIHTGDKPHKCEECGKAFSRSSGLIQHQRIHTREKTYPYNETKESFDPNCSLVIQQEVYPKEKSYKCDECGKTFSVSAHLVQHQRIHTGEKPYLCTVCGKSFSRSSFLIEHQRIHTGERPYLCRQCGKSFSQLCNLIRHQGVHTGNKPHKCDECGKAFSRNSGLIQHQRIHTGEKPYKCEKCDKSFSQQRSLVNHQMIHAEVKTQETHECDACGEAFNCRISLIQHQKLHTAWMQ

SEQ ID NO: 6281 - DNA, 1059 bp, Homo sapien
atggaggggatcagtatatacacttcagataactacaccgaggaaatgggctcaggggactatgactccatgaaggaaccctgtttccgtgaagaaaatgctaatttcaataaaatcttcctgcccaccatctactccatcatcttcttaactggcattgtgggcaatggattggtcatcctggtcatgggttaccagaagaaactgagaagcatgacggacaagtacaggctgcacctgtcagtggccgacctcctctttgtcatcacgcttcccttctgggcagttgatgccgtggcaaactggtactttgggaacttcctatgcaaggcagtccatgtcatctacacagtcaacctctacagcagtgtcctcatcctggccttcatcagtctggaccgctacctggccatcgtccacgccaccaacagtcagaggccaaggaagctgttggctgaaaaggtggtctatgttggcgtctggatccctgccctcctgctgactattcccgacttcatctttgccaacgtcagtgaggcagatgacagatatatctgtgaccgcttctaccccaatgacttgtgggtggttgtgttccagtttcagcacatcatggttggccttatcctgcctggtattgtcatcctgtcctgctattgcattatcatctccaagctgtcacactccaagggccaccagaagcgcaaggccctcaagaccacagtcatcctcatcctggctttcttcgcctgttggctgccttactacattgggatcagcatcgactccttcatcctcctggaaatcatcaagcaagggtgtgagtttgagaacactgtgcacaagtggatttccatcaccgaggccctagctttcttccactgttgtctgaaccccatcctctatgctttccttggagccaaatttaaaacctctgcccagcacgcactcacctctgtgagcagagggtccagcctcaagatcctctccaaaggaaagcgaggtggacattcatctgtttccactgagtctgagtcttcaagttttcactccagctaa

SEQ ID NO: 6282 - protein, 352 aa, Homo sapien; identical to SEQ ID NO: 2192

SEQ ID NO: 6283 - DNA, 1899 bp, Homo sapien
ggcacgaggctcttggtacctcagcgcgagcgccaggcgtccggccgccgtggctatgttcgtgtccgatttccgcaaagagttctacgaggtggtccagagccagagggtccttctcttcgtggcctcggacgtggatgctctgtgtgcgtgcaagatccttcaggccttgttccagtgtgaccacgtgcaatatacgctggttccagtttctgggtggcaagaacttgaaactgcatttcttgagcataaagaacagtttcattattttattctcataaactgtggagctaatgtagacctattggatattcttcaacctgatgaagacactatattctttgtgtgtgacacccataggccagtcaatgtcgtcaatgtatacaacgatacccagatcaaattactcattaaacaagatgatgaccttgaagttcccgcctatgaagacatcttcagggatgaagaggaggatgaagagcattcaggaaatgacagtgatgggtcagagccttctgagaagcgcacacggttagaagaggagatagtggagcaaaccatgcggaggaggcagcggcgagagtgggaggcccggagaagagacatcctctttgactacgagcagtatgaatatcatgggacatcgtcagccatggtgatgtttgagctggcttggatgctgtccaaggacctgaatgacatgctgtggtgggccatcgttggactaacagaccagtgggtgcaagacaagatcactcaaatgaaatacgtgactgatgttggtgtcctgcagcgccacgtttcccgccacaaccaccggaacgaggatgaggagaacacactctccgtggactgcacacggatctcctttgagtatgacctccgcctggtgctctaccagcactggtccctccatgacagcctgtgcaacaccagctataccgcagccaggttcaagctgtggtctgtgcatggacagaagcggctccaggagttccttgcagacatgggtcttcccctgaagcaggtgaagcagaagttccaggccatggacatctccttgaaggagaatttgcgggaaatgattgaagagtctgcaaataaatttgggatgaaggacatgcgcgtgcagactttcagcattcattttgggttcaagcacaagtttctggccagcgacgtggtctttgccaccatgtctttgatggagagccccgagaaggatggctcagggacagatcacttcatccaggctctggacagcctctccaggagtaacctggacaagctgtaccatggcctggaactcgccaagaagcagctgcgagccacccagcagaccattgccagctgcctttgcaccaacctcgtcatctcccaggggcctttcctgtactgctctctcatggagggcactccagatgtcatgctgttctctaggccggcatccctaagcctgctcagcaaacacctgctcaagtcctttgtgtgttcgacaaagaaccggcgctgcaaactgctgcccctggtgatggctgcccccctgagcatggagcatggcacagtgaccgtggtgggcatccccccagagaccgacagctcggacaggaagaacttttttgggagggcgtttgagaaggcagcggaaagcaccagctcccggatgctgcacaaccattttgacctctcagtaattgagctgaaagctgaggatcggagcaagtttctggacgcacttatttccctcctgtcctaggaatttgattcttccagaatgaccttcttatttatgtaactggctttcatttagattgtaagttatggacatgatttgagatgtagaagccattttttattaaataaaatgcttattttaaaaaaaaaaaaaaaaaaaaaaaa

SEQ ID NO: 6284 - protein, 566 aa, Homo sapien; identical to SEQ ID NO: 1267

SEQ ID NO: 6285 - DNA, 2424 bp, Homo sapien
atggaagacctgggggaaaacaccatggttttatccaccctgagatctttgaacaacttcatctctcagcgtgtggagggaggctctggactggatatttctacctcggccccaggttctctgcagatgcagtaccagcagagcatgcagctggaggaaagagcagagcagatccgttcgaagtcccacctcatccaggtggagcgggagaaaatgcagatggagctgagtcacaagagggctcgagtggagctggagagagcagccagcaccagtgccaggaactacgagcgtgaggtcgaccgcaaccaggagctcctgacgcgcatccggcagcttcaggagcgggaggccggggcggaggagaagatgcaggagcagctggagcgcaacaggcagtgtcagcagaacttggatgctgccagcaagaggctgcgtgagaaagaggacagtctggcccaggctggcgagaccatcaacgcactgaaggggaggatctcggaactgcagtggagcgtgatggaccaggagatgcgggtgaagcgcctggagtcggagaagcaggagctgcaggagcagctggacctgcaacacaaaaaatgccaggaagccaatcagaaaatccaggaactccaggccagccaagaagcaagagcagaccacgagcagcagattaaggatctggagcagaagctgtccctgcaagagcaggatgcagcgattgtgaagaacatgaagtctgagctggtacggctccctaggctggaacgggagctgaagcagctgcgggaggagagcgcgcacctgcgggagatgagagagaccaacgggctgctccaggaagagctggaagggctgcagaggaagctggggcgccaggagaagatgcaggagacgctggttggcttggagctggagaacgagaggctgctggccaagctgcaaagctgggagagactggaccagaccatgggcctgagcatcaggactccagaagacctttccagattcgtggttgagctgcagcagagggagcttgccttgaaggacaagaacagcgccgtcaccagcagcgcccgggggctggagaaggccaggcagcagctgcaggaggagctccggcaggtcagcggccagctgttggaggagaggaagaagcgcgagacccacgaggcgctggcccggaggctccagaaacgggtcctgctgctcaccaaggagcgggacggtatgcgggccatcctggggtcctacgacagcgagctgaccccggccgagtactcaccccagctgacgcggcgcatgcgggaggctgaggatatggtgcagaaggtgcacagccacagcgccgagatggaggctcagctgtcgcaggccctggaggagctgggaggccagaaacaaagagcagacatgctggagatggagctgaagatgctgaagtctcagtccagctctgccgaacagagcttcctgttctccagggaggaggcggacacgctcaggttgaaggtcgaggagctggaaggcgagcggagtcggctggaggaggaaaagaggatgctggaggcacagctggagcggcgagctctgcagggtgactatgaccagagcaggaccaaagtgctgcacatgagcctgaaccccaccagtgtggccaggcagcgcctgcgcgaggaccacagccagctgcaggcggagtgcgagcgactgcgcgggctcctgcgcgccatggagagaggaggcaccgtcccagccgaccttgaggctgccgccgcgagtctgccatcgtccaaggaggtggcagagctgaagaagcaggtggagagtgccgagctgaagaaccagcggctcaaggaggttttccagaccaagatccaggagttccgcaaggcctgctacacgctcaccggctaccagatcgacatcaccacggagaaccagtaccggctgacctcgctgtacgccgagcacccaggcgactgcctcatcttcaaggccaccagcccctcgggttccaagatgcagctactggagacagagttctcacacaccgtgggcgagctcatcgaggtgcacctgcggcgccaggacagcatccctgccttcctcagctcgctcaccctcgagctcttcagccgccagaccgtggcgtagcctgcaggctcgggggcatagccggagccactctgcttggcctgacctgcaggtcccctgccccgccagccacaggctgggtgcacgtcctgcctctccagccccacagggcagcagcatgactgacagacacgctgggacctacgtcgggcttcctgctggggcggccagcaccctctccacgtgcagaccccatgcgtcccggagcctggtgtgtgggcgtcggccaccagcctgggttcctcaccttgtgaaataaaatcttct

SEQ ID NO: 6286 - protein, 718 aa, Homo sapien
MEDLGENTMVLSTLRSLNNFISQRVEGGSGLDISTSAPGSLQMQYQQSMQLEERAEQIRSKSHLIQVEREKMQMELSHKRARVELERAASTSARNYEREVDRNQELLTRIRQLQEREAGAEEKMQEQLERNRQCQQNLDAASKRLREKEDSLAQAGETINALKGRISELQWSVMDQEMRVKRLESEKQELQEQLDLQHKKCQEANQKIQELQASQEARADHEQQIKDLEQKLSLQEQDAAIVKNMKSELVRLPRLERELKQLREESAHLREMRETNGLLQEELEGLQRKLGRQEKMQETLVGLELENERLLAKLQSWERLDQTMGLSIRTPEDLSRFVVELQQRELALKDKNSAVTSSARGLEKARQQLQEELRQVSGQLLEERKKRETHEALARRLQKRVLLLTKERDGMRAILGSYDSELTPAEYSPQLTRRMREAEDMVQKVHSHSAEMEAQLSQALEELGGQKQRADMLEMELKMLKSQSSSAEQSFLFSREEADTLRLKVEELEGERSRLEEEKRMLEAQLERRALQGDYDQSRTKVLHMSLNPTSVARQRLREDHSQLQAECERLRGLLRAMERGGTVPADLEAAAASLPSSKEVAELKKQVESAELKNQRLKEVFQTKIQEFRKACYTLTGYQIDITTENQYRLTSLYAEHPGDCLIFKATSPSGSKMQLLETEFSHTVGELIEVHLRRQDSIPAFLSSLTLELFSRQTVA

SEQ ID NO: 6287 - DNA, 727 bp, Homo sapien
gagaaggcactgcacggccacccccaactgccccgcactgtccctacccgggcagccatgcgagcggctggaactctgctggccttctgctgcctggtcttgagcaccactgggggcccttccccagatacttgttcccaggaccttaactcacgtgtgaagccaggatttcctaaaacaataaagaccaatgacccaggagtcctccaagcagccagatacagtgttgaaaagttcaacaactgcacgaacgacatgttcttgttcaaggagtcccgcatcacaagggccctagttcagatagtgaaaggcctgaaatatatgctcgaggtggaaattggcagaactacctgcaagaaaaaccagcacctgcgtctggatgactgtgacttccaaaccaaccacaccttgaagcagactctgagctgctactctgaagtctgggtcgtgccctggctccagcacttcgaggtgcctgtcctccgttgtcactgacccccgcctcttcagcaagaccacagccatgacaaacaccaggatgcatgctccttgtcccctcccacccgcctcatgacccagcctcacagaccctctcaggcctctgacgagtgagcgggtgaagtgccactgggtcaccgcagggcagctggaatggcagcatggtagcgcctcctaacagattaaatagatcacatttgcttctaaaaaaaaaaaaaaaaaaaaaaaa

SEQ ID NO: 6288 - protein, 145 aa, Homo sapien
MRAAGTLLAFCCLVLSTTGGPSPDTCSQDLNSRVKPGFPKTIKTNDPGVLQAARYSVEKFNNCTNDMFLFKESRITRALVQIVKGLKYMLEVEIGRTTCKKNQHLRLDDCDFQTNHTLKQTLSCYSEVWVVPWLQHFEVPVLRCH

SEQ ID NO: 6289 - DNA, 2208 bp, Homo sapien
attcctcggtatatcttggggactggaggacctgtctggttattatacagacgcataactggaggtgggatccacacagctcagaacagctggatcttgctcagtctctgccaggggaagattccttggaggaggccctgcagcgacatggagggagctgctttgctgagagtctctgtcctctgcatctggatgagtgcacttttccttggtgtgggagtgagggcagaggaagctggagcgagggtgcaacaaaacgttccaagtgggacagatactggagatcctcaaagtaagcccctcggtgactgggctgctggcaccatggacccagagagcagtatctttattgaggatgccattaagtatttcaaggaaaaagtgagcacacagaatctgctactcctgctgactgataatgaggcctggaacggattcgtggctgctgctgaactgcccaggaatgaggcagatgagctccgtaaagctctggacaaccttgcaagacaaatgatcatgaaagacaaaaactggcacgataaaggccagcagtacagaaactggtttctgaaagagtttcctcggttgaaaagtgagcttgaggataacataagaaggctccgtgcccttgcagatggggttcagaaggtccacaaaggcaccaccatcgccaatgtggtgtctggctctctcagcatttcctctggcatcctgaccctcgtcggcatgggtctggcacccttcacagagggaggcagccttgtactcttggaacctgggatggagttgggaatcacagcagctttgaccgggattaccagcagtaccatagactacggaaagaagtggtggacacaagcccaagcccacgacctggtcatcaaaagccttgacaaattgaaggaggtgaaggagtttttgggtgagaacatatccaactttctttccttagctggcaatacttaccaactcacacgaggcattgggaaggacatccgtgccctcagacgagccagagccaatcttcagtcagtaccgcatgcctcagcctcacgcccccgggtcactgagccaatctcagctgaaagcggtgaacaggtggagagagttaatgaacccagcatcctggaaatgagcagaggagtcaagctcacggatgtggcccctgtaggcttctttcttgtgctggatgtagtctacctcgtgtacgaatcaaagcacttacatgagggggcaaagtcagagacagctgaggagctgaagaaggtggctcaggagctggaggagaagctaaacatgctcaacaataattataagattctgcaggcggaccaagaactgtgaccacagggcagggcagccaccaggagagatatgcctggcaggggccaggacaaaatgcaaacttttttttttctgagacggagtcttgctctgtcgccaaggtggagcttgcagtgagccgagatatcgccactgcactccagcctgggtgacagagcgagactccgtctcaaaaaaaaaaaaaaaaaagaatatattgacggaagaatagagaggaggcttgaaggaaccagcaatgagaaggccaggaaaagaaagagctgaaaatggagaaagcccaagagttagaacagttggatacaggagaagaaacagcggctccactacagacccagccccaggttcaatgtcctccgaagaatgaagtctttccctggtgatggtcccctgccctgtctttccagcatccactctcccttgtcctcctgggggcacatctcagtcaggcagcggcttcctgatgatggtcgttggggtggttgtcatgtgatgggtcccctccaggttactaaagggtgcatgtcccctgcttgaacactgaagggcaggtggtgggccatggccatggtccccagctgaggagcaggtgtccctgagaacccaaacttcccagagagtatgtgagaaccaaccaatgaaaacagtcccatcgctcttacccggtaagtaaacagtcagaaaattagcatgaaagcagtttagcattgggaggaagctcagatctctagagctgtcttgtcgccgcccaggattgacctgtgtgtaagtcccaataaactcacctactcatcaaaaaaaaaaaaaaaaaaaaaaaaaaaaaaaaaaaaaaaaaaaaaaaaaaaaaaaaaaaaaaaaaaaaaaaaa

SEQ ID NO: 6290 - protein, 398 aa, Homo sapien [sequence omitted]

SEQ ID NO: 6291 - DNA, 2922 bp, Homo sapien; identical to SEQ ID NO: 348

SEQ ID NO: 6292 - protein, 412 aa, Homo sapien; identical to SEQ ID NO: 349

SEQ ID NO: 6293 - DNA, 1683 bp, Homo sapien
atgggggacgctcccagccctgaagagaaactgcaccttatcacccggaacctgcaggaggttctgggggaagagaagctgaaggagatactgaaggagcgggaacttaaaatttactggggaacggcaaccacgggcaaaccacatgtggcttactttgtgcccatgtcaaagattgcagacttcttaaaggcagggtgtgaggtaacaattctgtttgcggacctccacgcatacctggataacatgaaagccccatgggaacttctagaactccgagtcagttactatgagaatgtgatcaaagcaatgctggagagcattggtgtgcccttggagaagctcaagttcatcaaaggcactgattaccagctcagcaaagagtacacactagatgtgtacagactctcctccgtggtcacacagcacgattccaagaaggctggagctgaggtggtaaagcaggtggagcaccctttgctgagtggcctcttataccccggactgcaggctttggatgaagagtatttaaaagtagatgcccaatttggaggcattgatcagagaaagattttcacctttgcagagaagtacctccctgcacttggctattcaaaacgggtccatctgatgaatcctatggttccaggattaacaggcagcaaaatgagctcttcagaagaggagtccaagattgatctccttgatcggaaggaggatgtgaagaaaaaactgaagaaggccttctgtgagccaggaaatgtggagaacaatggggttctgtccttcatcaagcatgtcctttttccccttaagtccgagtttgtgatcctacgagatgagaaatggggtggaaacaaaacctacacagcttacgtggacctggaaaaggactttgctgctgaggttgtacatcctggagacctgaagaattctgttgaagtcgcactgaacaagttgctggatccaatccgggaaaagtttaatacccctgccctgaaaaaactggccagcgctgcctacccagatccctcaaagcagaagccaatggccaaaggccctgccaagaattcagaaccagaggaggtcatcccatcccggctggatatccgtgtggggaaaatcatcactgtggagaagcacccagatgcagacagcctgtatgtagagaagattgacgtgggggaagctgaaccacggactgtggtgagcggcctggtacagttcgtgcccaaggaggaactgcaggacaggctggtagtggtgctgtgcaacctgaaaccccagaagatgagaggagtcgagtcccaaggcatgcttctgtgtgcttctatagaagggataaaccgccaggttgaacctctggaccctccggcaggctctgctcctggtgagcacgtgtttgtgaagggctatgaaaagggccaaccagatgaggagctcaagcccaagaagaaagtcttcgagaagttgcaggctgacttcaaaatttctgaggagtgcatcgcacagtggaagcaaaccaacttcatgaccaagctgggctccatttcctgtaaatcgctgaaaggggggaacattagctagccagcccagcatcttccccccttcttccaccactgagtcatctgctgtctcttcagtctgctccatccatcacccatttacccatctctcaggaca

SEQ ID NO: 6294 - protein, 528 aa, Homo sapien; identical to SEQ ID NO: 2664

SEQ ID NO: 6295 - DNA, 2445 bp, Homo sapien
aggaatgttggtgctcccagcacctagcaccgggagactggagaggtttccaggagagtgacccgagtaggtcccctcctaattctggagccgtccctcgggctgcgcagtggagcgccgaggtggcgggaggctgcggggagcctgcgcggccaagcaccatctgcagtcaggagctcccgggcagcttgcagggcgcagtttttgaaagcgggtgctgcgtgcggaccgcgggcctgcagggatcttttgccagaaatgagggcatactggcctgacgtaattcactcgtttcccaatcgcagccgcttctggaagcatgagtgggaaaagcatgggacctgcgccgcccaggtggatgcgctcaactcccagaagaagtactttggcagaagcctggaactctacagggagctggacctcaacaggtgggtgcgcccttcccccggctgcacttcccagtggggatctctgctgtcgcccaagcctgacagctggatccaggggagtgggtgtagacctcactgccctccagcagcttctgcatgtgcactattcgactactgggatcattcctgaggaatgttctgagcctaccaagcctttccagatcattctacatcacgatcacacagagtgggtgcagagtattgggatgcccatctgggcaccatctcatcatcagagtcggccatagggaaaacgatgactccaaccagcatgtgccgaactctgtggccaagacagtctgacaataagttattgcccacagaggatgtctaagtctttgtgtccactctgtgatcgtgatctagaattttctaccaaggcttgatggggaactaggatattcttctgcaatgattcagaattttacagtgtacctttatactttaataagtgaattctatatatggtagtttggtaggattctgtgtagaagtgctttaggaggtgattgaaagctgtagggacttaccatacggttatgtattgcttggtgatggggtataaaattgtcatgtgaacatcttggagtgcacttacttagctgatacagcccacgacacacatatgctttgtggtatagcctgttgcttcgaggctacaaacctgtacagtgtgtgactctactgagtactgtaggcacctgtatgtaacacaatggtaaggatttgtgtatctaaacatatctcaacatagaaaaggcacagtagaaatgtggtcatatgggaccgccctcgtacatgcaggccttcactgactgaatgtcgtaatgtggcgcatgactgtgtttaaagatttgtccaaatgcagtttaccaggataagcctggaatccgatttcaattgctgtcttttaaagcaggtgtggcaaacgggtggtgatgtgtgtgccagctccactcggtggtggccccagcgctcccatgctccgaaggagtcaggaactggaaagggtacctgcctggagcagtttgtgtgtgtgctaaggggtggggaaggcggggactgggaaccatgtatttgcagtccatgttgacacatttgttgcataaagtcatagaaaacactttcctttaagagtgtcttaatttttaccatgaaatatgatacctgaaaagaacaagaaagcaaagtggaccttcattatacagctaacttttttaaatttaaattttagtgtgcttctaaaattggggataaaaccatccatcaattactaccaagtaagtcttgcttttgcttcttttctcgtgtgtctctcccggggacctccagtagggccgtttcagcctctgagtcaatgggctgtaaattgccccagtgcaaacccccttcctacttaaatgttatcatgtgaacagattttatttgcattttattttcctgcgcatgttgagtaggagctgaaggctgcttagaccagtgatttggaagcacagatttcatggctccctttgtgagaagtgtgtgctccagggtccggcagagcaggtggaatctgcagtttgaagagtcacattcacttttataacgtagtcttatatttgtttgtggtttgttttcatgataaaattgtgatttgttttatgataaaagaaactatagatatttaagcatgacaagatgttattagctggtaagcatatacaaaaagttgctttttgccaggtgtggtgactcacgcctataaatcccaggaccttgggaggctcaggctggaggattgcttgtggctagaatttcgagaccagcctgggcagcagagtgagacctctagaaagaagtaaaagtagctgagcatgatagtatgtgtctgtggtctcagctattcaggaagctaaggtcagaggattgcctgcgcccaggaatttgaggctgcagtgagccatggtcgccccactgcactccagtctgggcgacagccagatcacgtctcttt

SEQ ID NO: 6296 - protein, 125 aa, Homo sapien
MSGKSMGPAPPRWMRSTPRRSTLAEAWNSTGSWTSTGGCALPPAALPSGDLCCRPSLTAGSRGVGVDLTALQQLLHVHYSTTGIIPEECSEPTKPFQIILHHDHTEWVQSIGMPIWAPSHHQSRP

SEQ ID NO: 6297 - DNA, 1082 bp, Homo sapien
cagcgcacccccggacgctatggcccacccctccggctggccccttctgtaggatggtagcacacaaccaggtggcagccgacaatgcagtctccacagcagcagagccccgacggcggccagaaccttcctcctcttcctcctcctcgcccgcggcccccgcgcgcccgcggccgtgccccgcggtcccggccccggcccccggcgacacgcacttccgcacattccgttcgcacgccgattaccggcgcatcacgcgcgccagcgcgctcctggacgcctgcggattctactgggggcccctgagcgtgcacggggcgcacgagcggctgcgcgccgagcccgtgggcaccttcctggtgcgcgacagccgccagcggaactgctttttcgcccttagcgtgaagatggcctcgggacccacgagcatccgcgtgcactttcaggccggccgctttcacctggatggcagccgcgagagcttcgactgcctcttcgagctgctggagcactacgtggcggcgccgcgccgcatgctgggggccccgctgcgccagcgccgcgtgcggccgctgcaggagctgtgccgccagcgcatcgtggccaccgtgggccgcgagaacctggctcgcatccccctcaaccccgtcctccgcgactacctgagctccttccccttccagatttgaccggcagcgcccgccgtgcacgcagcattaactgggatgccgtgttattttgttattacttgcctggaaccatgtgggtaccctccccggcctgggttggagggagcggatgggtgtaggggcgaggcgcctcccgccctcggctggagacgaggccgcagaccccttctcacctcttgagggggtcctccccctcctggtgctccctctgggtccccctggttgttgtagcagcttaactgtatctggagccaggacctgaactcgcacctcctacctcttcatgtttacatatacccagtatctttgcacaaaccaggggttgggggagggtctctggctttatttttctgctgtgcagaatcctattttatattttttaaagtcagttta

SEQ ID NO: 6298 - protein, 211 aa, Homo sapien; identical to SEQ ID NO: 2379

SEQ ID NO: 6299 - DNA, 2486 bp, Homo sapien
ggcatcaccggccagccgggtggagtgagcggcgctgggctcgggctccggctccgcgggcggaagaggcggcggcggcggcagaagcggcggcggcggcggcggcgggagccgaggaggaggttccggacgctgcttaggaaccggggactcaggagtgcccgcgccctgagcgctcagctccagaggcgtcatggctgagtacgggaccctcctgcaagacctgaccaacaacatcacccttgaagatctagaacagctcaagtcggcctgcaaggaagacatccccagcgaaaagagtgaggagatcactactggcagtgcctggtttagcttcctggagagccacaacaagctggacaaagacaacctctcctacattgagcacatctttgagatctcccgccgtcctgacctactcactatggtggttgactacagaacccgtgtgctgaaaatctctgaggaggatgagctggacaccaagctaacccgtatccccagtgccaagaagtacaaagacattatccggcagccctctgaggaagagatcatcaaattggctcccccaccgaagaaggcctgagcaagggggaggaagaggaggaaggttggaccttcatcagaccactcccttcccccatcctccaggagagggggcaagggcaacccaccatctacccacttactaacctggtcctaacccccttactgtgcgcgtgtgtgtgcgtgtgcgcacgctctggctgtttgtctatatgtctagctcatctagttcctcttcttaaggggatgggggtcaggggctaggggagggggctgagtttccccactttaggaggaggtgggggctatttctatgcaaatagaaatcagcacattcctcctacttccctttcctccactccccccatatctttaaagtgtggaagcagaaaggacctgcattttcctacattgaggagctgacataggggtaaggtatgggagaggtaggtggatccagggaaaagcagtggggacggaaggcaaagagaccactcaacccccacctggaaggggcaaagaaaagccagagttccatgtttgtactcctgtgctggactgtttcctgagtaccagcaggtccctttttgtctctcatgggcctagcataggtatgagccagggatcctttcctggtccctaagatcaaaccccatggagcagccagcgttagatgcccccacccacctgtactctggagagactgtgctgggaacatgtaccactgagcctgagatggggatgagggcagagagaggggagccccctcttccactcagttgttcctactcagactgttgcactctaaacctagggaggttgaagaatgagacccttaggttttaacacgaatcctgacaccaccatctatagggtcccaacttggttattgtaggcaaccttccctctctccttggtgaagaacatcccaagccagaaagaagttaactacagtgttttcctttgcaccgatccccaccccaattcaatcccggaagggacttacttaggaaacccttctttactagatatcctggccccctgggcttgtgaacacctcctagccacatcactacagtacagtgagtgaccccagcctcctgcctaccccaagatgcccctccccaccctgaccgtgctaactgtgtgtacatatatattctacatatatgtatattaaaactgcactgccatgtctgcccttttttgtggtgtctagcattaacttattgtctaggccagagcgggggtgggaggggaatgccacagtgaagggagtggcagaatcaaattgctacatagtccaaacaaaaaagaaggctttttcaaaaaacattaaattcacatgcagtctcagagactatttagacaaagttcaagttaggagcttttaggatgtgggagtaaaactttaatgggaggggagggctggctgctggaagaaggaagaagccagactggttagacagtactcttaactcctagcccagcctagcgtgccctgcccctctggccactgctgcagacacctgccttaacacacacacctctaggactccacagttttgccttaaaggaccttcccaagtctccctttccctgtctggcttctcccttaagaagagagagatacttgtagaattgggtggggggaatgagcatgaactgtccttccatttgggatatgttacgttagagtgagagagagaataaggagcctttcttatggaagaaatgggagaagagagacagggttcttttcagcagagtctagtagtttctctgtaaggcaaaataatctaaaaagactaacctgcccacccactccttatattgctgtgagattgcccctatcttgtgctcttctgtctgcagtgtgcacggccttgttctaacccggaataaaggtgattgattgtattgcaaaaaaaaaaaaaaaa

SEQ ID NO: 6300 - protein, 130 aa, Homo sapien
MAEYGTLLQDLTNNITLEDLEQLKSACKEDIPSEKSEEITTGSAWFSFLESHNKLDKDNLSYIEHIFEISRRPDLLTMVVDYRTRVLKISEEDELDTKLTRIPSAKKYKDIIRQPSEEEIIKLAPPPKKA

SEQ ID NO: 6301 - DNA, 1273 bp, Homo sapien
aattaaggaattcaagatgaatattgaagctcttcgggagaatctttattttcagtccaaagagaacctttctgtgacattggaagtcatcttggagcgtatggaggactttactgattctgcctacaccagccatgagcacagagagcgcatcttggaactgtcaactcaggcgagaatggaactgcagcagttaatttctgtgtggattcaagctcaaagcaagaaaacaaaaagcatcgctgaagaactggaactcagtattttgaaaatcagtcacagtcttaatgaacttaagaaagaaataatttctgctgctgaaacattgacattgcatccatctagtaaaattgctaaagaaaacctagatgtattttgtgaagcttgggaatcccaaattagtgacatgtcaacactgctgagagaaatcaatgacgtgtttgaaggaagacgaggagagaagtatggctacctttcacttccaaagccaatgaagaataatgcaaacctgaaatcattaaagccagacaagcctgactctgaggagcaagccaagatagcaaagcttggacttaagctgggtttgctcacctctgacgctgactgcgaaattgagaagtgggaagatcaggagaatgagattgttcaatatggacggaacatgtccagtatggcctattctctgtatttatttactagaggagaggggccactgaaaacttcccaggatttaattcatcaactagaggtttttgctgcagagggtttaaagcttacttccagtgttcaagctttttcaaaacagctgaaagacgatgacaagcttatgcttctcctggaaataaacaagctaattcctctatgccaccagctccagacagtaactaagacttctttgcagaataaagtatttctaaaggttgacaagtgtattacgaagacaagatccatgatggctctcttagtccaacttctttcactttgttataaactgctgaagaagcttcagatggaaaataacggatgggtctcagttacaaataaggacactatggatagtaaaacttgagaagcttttggggtcagatctctggaacatcatgtgatgaagctgacatttttaaaaatcaaatgatcctttatcttttcagaaattcatcaattttataaagaaaacaatattgaaattttgctctattttctgatcatgaaactgattgtaaagctttttgacaactaataaatgtcttggtaattgctaaaaaaaaaaaaa

SEQ ID NO: 6302 - DNA, 1491 bp, Homo sapien
cgagactccatctcaaaaacaaaacaaataaacgaacaaaaaaacccacaacgtattattttcttgtttacgaggtttcttgtctctctggctccaccagaagaggagcagggacccttcttgctgttgttcattgctgcatcccccacaccgagagcagagcctggcatgggcagaaagtcctcagtcgatatttggtggccccaagcgaatgaagcatccaagaagggaaagctgggggctccccactgcacttgccacctgagtcacattttcagaagcctctggaaagtcgtgcacagcccaggagtgttgagcaatttcggtttcctctgaggttgaaggacccaggcgtgtcagccctgctccagacaccttgggcatggaggagagtgtcgtacggccctcagtgtttgtggtggatggacagaccgacatcccattcacgaggctgggacgaagccaccggagacagtcgtgcagtgtggcccgggtgggtctgggtctcttgctgttgctgatgggggctgggctggccgtccaaggctggttcctcctgcagctgcactggcgtctaggagagatggtcacccgcctgcctgacggacctgcaggctcctgggagcagctgatacaagagcgaaggtctcacgaggtcaacccagcagcgcatctcacaggggccaactccagcttgaccggcagcggggggccgctgttatgggagactcagctgggcctggccttcctgaggggcctcagctaccacgatggggcccttgtggtcaccaaagctggctactactacatctactccaaggtgcagctgggcggtgtgggctgcccgctgggcctggccagcaccatcacccacggcctctacaagcgcacaccccgctaccccgaggagctggagctgttggtcagccagcagtcaccctgcggacgggccaccagcagctcccgggtctggtgggacagcagcttcctgggtggtgtggtacacctggaggctggggagaaggtggtcgtccgtgtgctggatgaacgcctggttcgactgcgtgatggtacccggtcttacttcggggctttcatggtgtgaaggaaggagcgtggtgcattggacatgggtctgacacgtggagaactcagagggtgcctcaggggaaagaaaactcacgaagcagaggctgggcgtggtggctctcgcctgtaatcccagcactttgggaggccaaggcaggcggatcacctgaggtcaggagttcgagaccagcctggctaacatggcaaaaccccatctctactaaaaatacaaaaattagccggacgtggtggtgcctgcctgtaatccagctactcaggaggctgaggcaggataattttgcttaaacccgggaggcggaggttgcagtgagccgagatcacaccactgcactccaacctgggaaacgcagtgagactgtgcctcaaaaaaaaaaaaaaaaa

SEQ ID NO: 6303 - protein, 240 aa, Homo sapien
MEESVVRPSVFVVDGQTDIPFTRLGRSHRRQSCSVARVGLGLLLLLMGAGLAVQGWFLLQLHWRLGEMVTRLPDGPAGSWEQLIQERRSHEVNPAAHLTGANSSLTGSGGPLLWETQLGLAFLRGLSYHDGALVVTKAGYYYIYSKVQLGGVGCPLGLASTITHGLYKRTPRYPEELELLVSQQSPCGRATSSSRVWWDSSFLGGVVHLEAGEKVVVRVLDERLVRLRDGTRSYFGAFMV

SEQ ID NO: 6304 - DNA, 1042 bp, Homo sapien
tttcctcactgactataaaagaatagagaaggaagggcttcagtgaccggctgcctggctgacttacagcagtcagactctgacaggatcatggctatgatggaggtccaggggggacccagcctgggacagacctgcgtgctgatcgtgatcttcacagtgctcctgcagtctctctgtgtggctgtaacttacgtgtactttaccaacgagctgaagcagatgcaggacaagtactccaaaagtggcattgcttgtttcttaaaagaagatgacagttattgggaccccaatgacgaagagagtatgaacagcccctgctggcaagtcaagtggcaactccgtcagctcgttagaaagatgattttgagaacctctgaggaaaccatttctacagttcaagaaaagcaacaaaatatttctcccctagtgagagaaagaggtcctcagagagtagcagctcacataactgggaccagaggaagaagcaacacattgtcttctccaaactccaagaatgaaaaggctctgggccgcaaaataaactcctgggaatcatcaaggagtgggcattcattcctgagcaacttgcacttgaggaatggtgaactggtcatccatgaaaaagggttttactacatctattcccaaacatactttcgatttcaggaggaaataaaagaaaacacaaagaacgacaaacaaatggtccaatatatttacaaatacacaagttatcctgaccctatattgttgatgaaaagtgctagaaatagttgttggtctaaagatgcagaatatggactctattccatctatcaagggggaatatttgagcttaaggaaaatgacagaatttttgtttctgtaacaaatgagcacttgatagacatggaccatgaagccagttttttcggggcctttttagttggctaactgacctggaaagaaaaagcaataacctcaaagtgactattcagttttcaggatgatacactatgaagatgtttcaaaaaatctgaccaaaacaaacaaacagaaa

SEQ ID NO: 6305 - protein, 281 aa, Homo sapien [sequence omitted]

SEQ ID NO: 6306 - DNA, 3865 bp, Homo sapien
cggcagggttggaaaatgatggaagaggcggaggtggaggcgaccgagtgctgagaggaacctgcggaatcggccgagatggggtctggcgcgcgctttccctcggggacccttcgtgtccggtggttgctgttgcttggcctggtgggcccagtcctcggtgcggcgcggccaggctttcaacagacctcacatctttcttcttatgaaattataactccttggagattaactagagaaagaagagaagcccctaggccctattcaaaacaagtatcttatgttattcaggctgaaggaaaagagcatattattcacttggaaaggaacaaagaccttttgcctgaagattttgtggtttatacttacaacaaggaagggactttaatcactgaccatcccaatatacagaatcattgtcattatcggggctatgtggagggagttcataattcatccattgctcttagcgactgttttggactcagaggattgctgcatttagagaatgcgagttatgggattgaacccctgcagaacagctctcattttgagcacatcatttatcgaatggatgatgtctacaaagagcctctgaaatgtggagtttccaacaaggatatagagaaagaaactgcaaaggatgaagaggaagagcctcccagcatgactcagctacttcgaagaagaagagctgtcttgccacagacccggtatgtggagctgttcattgtcgtagacaaggaaaggtatgacatgatgggaagaaatcagactgctgtgagagaagagatgattctcctggcaaactacttggatagtatgtatattatgttaaatattcgaattgtgctagttggactggagatttggaccaatggaaacctgatcaacatagttgggggtgctggtgatgtgctggggaacttcgtgcagtggcgggaaaagtttcttatcacacgtcggagacatgacagtgcacagctagttctaaagaaaggttttggtggaactgcaggaatggcatttgtgggaacagtgtgttcaaggagccacgcaggcgggattaatgtgtttggacaaatcactgtggagacatttgcttccattgttgctcatgaattgggtcataatcttggaatgaatcacgatgatgggagagattgttcctgtggagcaaagagctgcatcatgaattcaggagcatcgggttccagaaactttagcagttgcagtgcagaggactttgagaagttaactttaaataaaggaggaaactgccttcttaatattccaaagcctgatgaagcctatagtgctccctcctgtggtaataagttggtggacgctggggaagagtgtgactgtggtactccaaaggaatgtgaattggacccttgctgcgaaggaagtacctgtaagcttaaatcatttgctgagtgtgcatatggtgactgttgtaaagactgtcggttccttccaggaggtactttatgccgaggaaaaaccagtgagtgtgatgttccagagtactgcaatggttcttctcagttctgtcagccagatgtttttattcagaatggatatccttgccagaataacaaagcctattgctacaacggcatgtgccagtattatgatgctcaatgtcaagtcatctttggctcaaaagccaaggctgcccccaaagattgtttcattgaagtgaattctaaaggtgacagatttggcaattgtggtttctctggcaatgaatacaagaagtgtgccactgggaatgctttgtgtggaaagcttcagtgtgagaatgtacaagagatacctgtatttggaattgtgcctgctattattcaaacgcctagtcgaggcaccaaatgttggggtgtggatttccagctaggatcagatgttccagatcctgggatggttaacgaaggcacaaaatgtggtgctggaaagatctgtagaaacttccagtgtgtagatgcttctgttctgaattatgactgtgatgttcagaaaaagtgtcatggacatggggtatgtaatagcaataagaattgtcactgtgaaaatggctgggctcccccaaattgtgagactaaaggatacggaggaagtgtggacagtggacctacatacaatgaaatgaatactgcattgagggacggacttctggtcttcttcttcctaattgttccccttattgtctgtgctatttttatcttcatcaagagggatcaactgtggagaagctacttcagaaagaagagatcacaaacatatgagtcagatggcaaaaatcaagcaaacccttctagacagccggggagtgttcctcgacatgtttctccagtgacacctcccagagaagttcctatatatgcaaacagatttgcagtaccaacctatgcagccaagcaacctcagcagttcccatcaaggccacctccaccacaaccgaaagtatcatctcagggaaacttaattcctgcccgtcctgctcctgcacctcctttatatagttccctcacttgatttttttaaccttctttttgcaaatgtcttcagggaactgagctaatactttttttttttcttgatgttttcttgaaaagcctttctgttgcaactatgaatgaaaacaaaacaccacaaaacagacttcactaacacagaaaaacagaaactgagtgtgagagttgtgaaatacaaggaaatgcagtaaagccagggaatttacaataacatttccgtttccatcattgaataagtcttattcagtcatcggtgaggttaatgcactaatcatggattttttgaacatgttattgcagtgattctcaaattaactgtattggtgtaagatttttgtcattaagtgtttaagtgttattctgaattttctaccttagttatcattaatgtagttcctcattgaacatgtgataatctaatacctgtgaaaactgactaatcagctgccaataatatctaatatttttcatcatgcacgaattaataatcatcatactctagaatcttgtctgtcactcactacatgaataagcaaatattgtcttcaaaagaatgcacaagaaccacaattaagatgtcatattattttgaaagtacaaaatatactaaaagagtgtgtgtgtattcacgcagttactcgcttccatttttatgacctttcaactataggtaataactcttagagaaattaatttaatattagaatttctattatgaatcatgtgaaagcatgacattcgttcacaatagcactattttaaataaattataagctttaaggtacgaagtatttaatagatctaatcaaatatgttgattcatggctataataaagcaggagcaattataaaatcttcaatcaattgaacttttacaaaaccacttgagaatttcatgagcactttaaaatctgaactttcaaagcttgctattaaatcatttagaatgtttacatttactaaggtgtgctgggtcatgtaaaatattagacactaatattttcatagaaattaggctggagaaagaaggaagaaatggttttcttaaatacctacaaaaaagttactgtggtatctatgagttatcatcttagctgtgttaaaaatgaatttttactatggcagatatggtatggatcgtaaaattttaagcactaaaaattttttcataacctttcataataaagtttaataataggtttattaactgaatttcattagttttttaaaagtgtttttggtttgtgtatatatacatatacaaatacaacatttacaataaataaaatacttgaaattctcaaaaaaaaaaaaaaaaaaaaaaaaaa

SEQ ID NO: 6307 - protein, 819 aa, Homo sapien
MGSGARFPSGTLRVRWLLLLGLVGPVLGAARPGFQQTSHLSSYEIITPWRLTRERREAPRPYSKQVSYVIQAEGKEHIIHLERNKDLLPEDFVVYTYNKEGTLITDHPNIQNHCHYRGYVEGVHNSSIALSDCFGLRGLLHLENASYGIEPLQNSSHFEHIIYRMDDVYKEPLKCGVSNKDIEKETAKDEEEEPPSMTQLLRRRRAVLPQTRYVELFIVVDKERYDMMGRNQTAVREEMILLANYLDSMYIMLNIRIVLVGLEIWTNGNLINIVGGAGDVLGNFVQWREKFLITRRRHDSAQLVLKKGFGGTAGMAFVGTVCSRSHAGGINVFGQITVETFASIVAHELGHNLGMNHDDGRDCSCGAKSCIMNSGASGSRNFSSCSAEDFEKLTLNKGGNCLLNIPKPDEAYSAPSCGNKLVDAGEECDCGTPKECELDPCCEGSTCKLKSFAECAYGDCCKDCRFLPGGTLCRGKTSECDVPEYCNGSSQFCQPDVFIQNGYPCQNNKAYCYNGMCQYYDAQCQVIFGSKAKAAPKDCFIEVNSKGDRFGNCGFSGNEYKKCATGNALCGKLQCENVQEIPVFGIVPAIIQTPSRGTKCWGVDFQLGSDVPDPGMVNEGTKCGAGKICRNFQCVDASVLNYDCDVQKKCHGHGVCNSNKNCHCENGWAPPNCETKGYGGSVDSGPTYNEMNTALRDGLLVFFFLIVPLIVCAIFIFIKRDQLWRSYFRKKRSQTYESDGKNQANPSRQPGSVPRHVSPVTPPREVPIYANRFAVPTYAAKQPQQFPSRPPPPQPKVSSQGNLIPARPAPAPPLYSSLT

SEQ ID NO: 6308 - DNA, 1734 bp, Homo sapien
ggcacgaggagtgaatcaggcaccggagtgcaggttcgggggtggaatccttgggccgctgggcaagcggcgagacctggccagggccagcgagccgaggacagagggcgcgcggagggccgggccgcagccccggccgcttgcagaccccgccatggacccgttcctggtgctgctgcactcggtgtcgtccagcctgtcgagcagcgagctgaccgagctcaagttcctatgcctcgggcgcgtgggcaagcgcaagctggagcgcgtgcagagcggcctagacctcttctccatgctgctggagcagaacgacctggagcccgggcacaccgagctcctgcgcgagctgctcgcctccctgcggcgccacgacctgctgcggcgcgtcgacgacttcgaggcgggggcggcggccggggccgcgcctggggaagaagacctgtgtgcagcatttaacgtcatatgtgataatgtggggaaagattggagaaggctggctcgtcagctcaaagtctcagacaccaagatcgacagcatcgaggacagatacccccgcaacctgacagagcgtgtgcgggagtcactgagaatctggaagaacacagagaaggagaacgcaacagtggcccacctggtgggggctctcaggtcctgccagatgaacctggtggctgacctggtacaagaggttcagcaggcccgtgacctccagaacaggagtggggccatgtccccgatgtcatggaactcagacgcatctacctccgaagcgtcctgatgggccgctgctttgcgctggtggaccacaggcatctacacagcctggactttggttctctccaggaaggtagcccagcactgtgaagacccagcaggaagccaggctgagtgagccacagaccacctgcttctgaactcaagctgcgtttattaatgcctctcccgcaccaggccgggcttgggccctgcacagatatttccatttcttcctcactatgacactgagcaagatcttgtctccactaaatgagctcctgcgggagtagttggaaagttggaaccgtgtccagcacagaaggaatctgtgcagatgagcagtcacactgttactccacagcggaggagaccagctcagaggcccaggaatcggagcgaagcagagaggtggagaactgggatttgaacccccgccatccttcaccagagcccatgctcaaccactgtggcgttctgctgcccctgcagttggcagaaaggatgttttgtcccatttccttggaggccaccgggacagacctggacactagggtcaggcggggtgctgttgtggtggggagaggcatggctggggtgggggtggggagacctggttggccgtggtccagctcttggcccctgtgtgagttgagtctcctctctgagactgctaagtaggggcagtgatggttgccaggacgaattgagataatatctgtgaggtgctgatgagtgattgacacacagcactctctaaatcttccttgtgaggattatgggtcctgcaattctacagtttcttactgttttgtatcaaaatcactatctttctgataacagaattgccaaggcagcgggatctcgtatctttaaaaagcagtcctcttattcctaaggtaatcctattaaaacacagctttacaacttccatattaaaaaaaaaaaaaaaaaaaaaaaaaaaaaaaaaaaaaaaaa

SEQ ID NO: 6309 - protein, 208 aa, Homo sapien; identical to SEQ ID NO: 800

SEQ ID NO: 6310 - DNA, 1723 bp, Homo sapien
actccgaatgcgaagttctgtcttgtcatagccaagcacgctgcttcttggattgacctggcaggatggcgccaccaccagctagagtacatctaggtgcgttcctggcagtgactccgaatcccgggagcgcagcgagtgggacagaggcagccgcggccacacccagcaaagtgtggggctcttccgcggggaggattgaaccacgaggcgggggccgaggagcgctccctacctccatgggacagcacggacccagtgcccgggcccgggcagggcgcgccccaggacccaggccggcgcgggaagccagccctcggctccgggtccacaagaccttcaagtttgtcgtcgtcggggtcctgctgcaggtcgtacctagctcagctgcaaccatcaaacttcatgatcaatcaattggcacacagcaatgggaacatagccctttgggagagttgtgtccaccaggatctcatagatcagaacatcctggagcctgtaaccggtgcacagagggtgtgggttacaccaatgcttccaacaatttgtttgcttgcctcccatgtacagcttgtaaatcagatgaagaagagagaagtccctgcaccacgaccaggaacacagcatgtcagtgcaaaccaggaactttccggaatgacaattctgctgagatgtgccggaagtgcagcagagggtgccccagagggatggtcaaggtcaaggattgtacgccctggagtgacatcgagtgtgtccacaaagaatcaggcaatggacataatatatgggtgattttggttgtgactttggttgttccgttgctgttggtggctgtgctgattgtctgttgttgcatcggctcaggttgtggaggggaccccaagtgcatggacagggtgtgtttctggcgcttgggtctcctacgagggcctggggctgaggacaatgctcacaacgagattctgagcaacgcagactcgctgtccactttcgtctctgagcagcaaatggaaagccaggagccggcagatttgacaggtgtcactgtacagtccccaggggaggcacagtgtctgctgggaccggcagaagctgaagggtctcagaggaggaggctgctggttccagcaaatggtgctgaccccactgagactctgatgctgttctttgacaagtttgcaaacatcgtgccctttgactcctgggaccagctcatgaggcagctggacctcacgaaaaatgagatcgatgtggtcagagctggtacagcaggcccaggggatgccttgtatgcaatgctgatgaaatgggtcaacaaaactggacggaacgcctcgatccacaccctgctggatgccttggagaggatggaagagagacatgcaaaagagaagattcaggacctcttggtggactctggaaagttcatctacttagaagatggcacaggctctgccgtgtccttggagtgaaagactctttttaccagaggtttcctcttaggtgttaggagttaatacatattaggttttttttttttttaacatgtatacaaagtaaattcttagccaggtgtagtggctcatgcctgtaatcccagcactttgggaggctgaggcgggtggatcacttgaggtcagaagttcaagaccagcctgaccaacatcgtgaaatgccgtctttacaaaaaaatacaaaaattaactggaaaaaaaaaaaaaaa

SEQ ID NO: 6311 - protein, 468 aa, Homo sapien
MAPPPARVHLGAFLAVTPNPGSAASGTEAAAATPSKVWGSSAGRIEPRGGGRGALPTSMGQHGPSARARAGRAPGPRPAREASPRLRVHKTFKFVVVGVLLQVVPSSAATIKLHDQSIGTQQWEHSPLGELCPPGSHRSEHPGACNRCTEGVGYTNASNNLFACLPCTACKSDEEERSPCTTTRNTACQCKPGTFRNDNSAEMCRKCSRGCPRGMVKVKDCTPWSDIECVHKESGNGHNIWVILVVTLVVPLLLVAVLIVCCCIGSGCGGDPKCMDRVCFWRLGLLRGPGAEDNAHNEILSNADSLSTFVSEQQMESQEPADLTGVTVQSPGEAQCLLGPAEAEGSQRRRLLVPANGADPTETLMLFFDKFANIVPFDSWDQLMRQLDLTKNEIDVVRAGTAGPGDALYAMLMKWVNKTGRNASIHTLLDALERMEERHAKEKIQDLLVDSGKFIYLEDGTGSAVSLE

SEQ ID NO: 6312 - DNA, 2681 bp, Homo sapien; identical to SEQ ID NO: 1838

SEQ ID NO: 6313 - protein, 599 aa, Homo sapien; identical to SEQ ID NO: 1839

SEQ ID NO: 6314 - DNA, 3522 bp, Homo sapien; identical to SEQ ID NO: 1788

SEQ ID NO: 6315 - protein, 541 aa, Homo sapien; identical to SEQ ID NO: 1789

SEQ ID NO: 6316 - DNA, 1947 bp, Homo sapien
ggcttactcactatagggctcgagcggccgcccgggcaggtctagaattcagcggccgctgaattctagcggaggcggcggcggcggccgcggccgaggtcgaggcgatcagtgggtgaccgcggctgcgagggactttgtcatccgtcctccaggatctggggagaaagagccccatcccttctctctctgccaccatttcggacaccccgcagggactcgttttgggattcgcactgacttcaaggaaggacgcgaacccttctctgaccccagctcgggcggccacctgtctttgccgcggtgacccttctctcatgaccctgcggtgccttgagccctccgggaatggcggggaagggacgcggagccagtgggggaccgcggggtcggcggaggagccatccccgcaggcggcgcgtctggcgaaggccctgcgggagctcggtcagacaggatggtactggggaagtatgactgttaatgaagccaaagagaaattaaaagaggcaccagaaggaactttcttgattagagatagctcgcattcagactacctactaacaatatctgttaaaacatcagctggaccaactaatcttcgaatcgaataccaagacggaaaattcagattggactctatcatatgtgtcaaatccaagcttaaacaatttgacagtgtggttcatctgatcgactactatgttcagatgtgcaaggataagcggacaggtccagaagccccccggaacggcactgttcacctttatctgaccaaaccgctctacacgtcagcaccatctctgcagcatctctgtaggctcaccattaacaaatgtaccggtgccatctggggactgcctttaccaacaagactaaaagattacttggaagaatataaattccaggtataaatgtttctctttttttaaacatgtctcacatagagtatctccgaatgcagctatgtaaaagagaaccaaaacttgagtgctctggataactatatggaatgctttctaagaacagctgaagctaatctaatttaaatttaacagcttgaagaggtagctaggtgtttaaagttcctccagatacttttacctgagtgatgcttcccttcctaaggctgaccaagacctgttgatccttttagattaaaaataaaatgtcgcatgtaaaggctgaagtcgcgttttatcagaatgccttgccttcttaggttcttttccattatgtcaaaggtccaggctccagtaggagagaaagaactcctcataggaatactgaagaagtgggaaggaaccaagctgacacaggcctcactgcaatttgatatgcctgctgatcagagtctcttgggcattttatattttgcattctgatgtacctaggagttttgttaaacagatgatgtatgtgagtatttatcccattttatgcaattaaccaaatcaaccaaaaaaagtgaccatgaagtcctgtatttgtctttttactacatgtaggaactctcatgtgaatgagtactgtagtaatccattctatgggagccttatttcagaaatatttcaaactggtgcaaatggaaaagactttctcttttcctttaaagctaaagacaagaatatcatgctatacaggtgcaactcaatccccgttaataaaaaccaatgtaggtataggcattctaccctttcaaatagctgtgtcccaacctgttgccattgattttttggaaatggctttagaaatatccaagttgtccttgaattgtctaaccatggacataaacagttgtctcccttctactgtgtagaatactttgacttaattttcttccagatacagggggatacctgcctgtttttcaaagtgtttatttactgctgttactatttgattagaatgtattaaataaaaaaaacctgatttctaaaaaaaaaa

SEQ ID NO: 6317 - protein, 198 aa, Homo sapien; identical to SEQ ID NO: 1066

SEQ ID NO: 6318 - DNA, 1236 bp, Homo sapien
acttggccttacactccgctcggctcaccatgtgtcactctcgcagctgccacccgaccatgaccatcctgcaggccccgaccccggccccctccaccatcccgggaccccggcggggctccggtcctgagatcttcaccttcgaccctctcccggagcccgcagcggcccctgccgggcgccccagcgcctctcgcgggcaccgaaagcgcagccgcagggttctctaccctcgagtggtccggcgccagctgccagtcgaggaaccgaacccagccaaaaggcttctctttctgctgctcaccatcgtcttctgccagatcctgatggctgaagagggtgtgccggcgcccctgcctccagaggacgcccctaacgccgcatccctggcgcccacccctgtgtcccccgtcctcgagccctttaatctgacttcggagccctcggactacgctctggacctcagcactttcctccagcaacacccggccgccttctaactgtgactccccgcactccccaaaaagaatccgaaaaaccacaaagaaacaccaggcgtacctggtgcgcgagagcgtatccccaactgggacttccgaggcaacttgaactcagaacactacagcggagacgccacccggtgcttgaggcgggaccgaggcgcacagagaccgaggcgcatagagaccgaggcacagcccagctggggctaggcccggtgggaaggagagcgtcgttaatttatttcttattgctcctaattaatatttatatgtatttatgtacgtcctcctaggtgatggagatgtgtacgtaatatttattttaacttatgcaagggtgtgagatgttccccctgctgtaaatgcaggtctcttggtatttattgagctttgtgggactggtggaagcaggacacctggaactgcggcaaagtaggagaagaaatggggaggactcgggtgggggaggacgtcccggctgggatgaagtctggtggtgggtcgtaagtttaggaggtgactgcatcctccagcatctcaactccgtctgtctactgtgtgagacttcggcggaccattaggaatgagatccgtgagatccttccatcttcttgaagtcgcctttagggtggctacgaggtagaggggtgggggttggtgggctgtcacggagcgactgtcgagatcgcctagtatgttctgtgaacacaaataaaattgatttactgtctgc

SEQ ID NO: 6319 - protein, 193 aa, Homo sapien; identical to SEQ ID NO: 524

SEQ ID NO: 6320 - DNA, 6296 bp, Homo sapien; identical to SEQ ID NO: 1124

SEQ ID NO: 6321 - protein, 515 aa, Homo sapien; identical to SEQ ID NO: 1125

SEQ ID NO: 6322 - DNA, 591 bp, Homo sapien; identical to SEQ ID NO: 1308

SEQ ID NO: 6323 - protein, 86 aa, Homo sapien; identical to SEQ ID NO: 1309

SEQ ID NO: 6324 - DNA, 4863 bp, Homo sapien
ggatccttctgccttgacctcccaagtgctggaattgcaggcatgagccattgcacccggcttttttttttttttttctttgagacaggcacttgcactgttgcctagactggagtgcagtagcgggattagagttcactgcagcctcaacctcccaagctcaagcgatcctcccaccttacccttcctgaatggatggggccacaggtgtgtaccatcacacgtagttaatttttaaactttttcagagacggggtttctccatgttgcccaggctggtcttgaactcccggcttccagtgatcctcctgcctcagcttcccaaagtgctgggattacaggcatgaaccactgcacccaaccttttttcattcccttaacgaaacctttggatgaacaaaaattcttaatttcagtgaagttcagtttatcgacttcaatttatacattttataaagtttatgaatttttttttttttttttagacggagtcttgctctgtcgcccaggctggagtgcagtggctatacccaggtgtgatcataactcactccagcctcaaactcctgggctcaaggattcctcctgcctcagtctccagagtaggtgggaccacaggcacatccaccacactggctaattttttttatttgtagtggagactacgtcttactgtttgcccaggctggtctccaactcctgggttcaagtgatccacctcattctcccaaagcgctgggattgtaggagtgagccactgcacccagcctgtctgctaatattatgtttaagagttctgaatctttttttaaattttttaaaatttttaattttttattttttttgagacagtcttgctctgtcgcccaggctggagtgcaatggtgcaatcttggctcaatgcaacctccgccttctgggttcaagcgattctcctgccttagcctcctgagtagctgggattacaggtacactccaccatgcctggctaatttttttgtatttttagtagagatgggatttcaccatgttggtcaggctggtctcgacctcctgacctcgtgatcctcctgcctccaccccccaaagcgccaggattctaggtgtgagccaccacacctgtcctgaatctatatttatgagagacattggccttaagctctctttttttttttttttttttttttttgagatggagtctcgctctgtcacccaggctggagtgcagtggcgcaatctcggctcactgcaagctccgcctcccgggttcacgccattctcctgcctcagcctcccaagtggctgggactacaggcgcggccaccacgcccggctaattttttgtatttttagtagagatggggtttcaccgtgttagccgggatagtctcaatctcctgacctcgtgatccgcctgcctcggcctcccaaagtgctgggattacaggcgtgagccaccgcgcctggccaagttctctttcttataatgtgctttgttgtcaagatgatgctgacctcataaaatatgctgggagagtgtttcctctgttttatggcctgaagagttagtgtaggaatagaatcatttctacattggaagaattcactaattgatgtcttctggacctggaattttagtttttggaaagttttaaactatgattaaaaattttaaataggccgggtgtggtgcatcatgcctgtaatcccagcactttgggaggctgaggcaggtagatcacaatgtcaggaatttgagaccagcctggccaatatggtgaaacaccgtctctactaaaaataaaaaaattacccggcatggtggtgcatgcacctgtagtcccagccactcgggaggctgtggaagaagaaactcttgaacccaggaagtgggggttgcagtgagtcgagatcgtgccactgcactccagcctgggtgacagagcgagactcttatctcaaaaacaaaaggctaggcgtggtggctcacacctgtaatcccaacactttggaggcccaggcggatggatcatgaggtcaggagattgagaccatcctggctaagacggtgaaaccccgtctctactaaaaatacaaaaaattagccaagtgtggtggtgggcacctatagtcccagctactcaggaggctgaggcaggagaatggcgtgaacccaggaggcggagcttgcagtgagccgagatcgcgccactgcactccagcctgggagacagagcaagattccatctcaaaaaaaaaaaaaaaatttaaatagttataggactacagacgttttaaatttcctcttgtgtcagtttagaaggttgtatttatcaggaatgtgttcagttcatctaaattttcaaatgtgttgctgtggaatttttcataattatcctctatctttttttttttttctttttttctgagacggggtctcactctgtcgcccaggctggagtgcagtggcacgatcctggctcactgcaacatctgcctcccaggttcaagcaattctcctgcctcagcctcctgagtagctgggactacaggtgcccggctaatttttgtatttttagtagagatggggtttcaccatgttggccagtgtggtctcgaactcctgacctcaggtgatccacccactttggcctcccaaagtgttgcgattacaggcgtgagccaacatgcccagcccaaggaggtgacatcttgaggggacaccttcggggtggacagttgagtctctgtcacctaggaagtgcctccccttttaccactgtattatctgcggttagcacagtgcaaacatggaggcctctttctgtccctatccagccctggctctgggagtggtgggctcgcgacttaggcctgtctgcctgatttcctgcagagcccccctccatgcgcctgaaggcccgacccagcagccctggcttttccgtgcttacctgcagcgccttctccttctaccctccggagctgcaacttcggttcctgcggaatgggctggccgctggcaccggccagggtgacttcggccccaacagtgacggatccttccacgcctcgtcgtcactaacagtcaaaagtggcgatgagcaccactactgctgcattgtgcagcacgcggggctggcgcagcccctcagggtggagctgggtgaggtcccgccaggtggtgatgctcctggtttcccgttgccttgtctcactgctgcgccggtccttcctgagtctgaccttcctccccactgctgccacctccttgaatctgactgccttgaacctcacgcctgtcagtgcccccaaaacctgatggcttgtccttcccaaggccaactgccttccgtctcctgctgcttctggcctcactgagtctgaagagctgttaactaccatggccagtcctccctgagtctgaccatcttccatcctgctgctgctgctgctgctgctgcgggtcttcctggaatctgaccattcgttgtctgctatgcccgtacctcaccaagactgactgcctgctgctttgctactgcccgggcccatgagactgacttcccactgctctgcctgcctctccccactgcactggcacagcccgccttgccgctgctgatccattgccggtgtgaccgcggccgctcgtgctgtagctggttcttacgtccaacctgggggcagtctgccagatcgcctgcctggcctcgcctctgcccatcagacacttggtgctggaatctccgaggctgggagggactgggagcgccccagttctgtgtcctgactgggtggggtggaggggctgctccacatctcacagcgttctctggctgcagaatctccagccaagtcctccgtgctcgtggtgggaatcgtcatcggtgtcttgctactcacggcagcggctgtaggaggagctctgttgtggagaaggatgaggagtgggctgccaggtggggggcagcgggaggaagagcctctgagagagggacagagaccccaagagaggggcacacagacctgggaggacagagacccagagaggggggacagagatcagagagaggtggagacagaaacccagagatgggagaacagaggtgcagagagagggggacggagacagagacccagagacgggggaacagagacccagagggacagagagaggtgcggacagagggagggggagacagacccagaggagggaggcaaagatgtagaaagaggggggacggaaaattgggagaaggggagacaaaggcccagaaggaaggggatagagactgaggaagagtgtgtgagacacacacacaaatgggggacgccagtcagacccagagcgcctcagagattctgatgacctctccctctctctctctcctcagccccttggatctcccttcgtggagacgacaccggggtcctcctgcccaccccaggggaggcccaggatgctgatttgaaggatgtaaatgtgattccagccaccgcctgaccatccgccattccgactgctaaaagcgaatgtagtcaggcccctttcatgctgtgagacctcctggaacactggcatctctgagcctccagaaggggttctgggcctagttgtcctccctctggagccccgtcctgtggtctgcctcagtttcccctcctaatacatatggctgttttccacctcgataatataacacgagtttgggcccgaatcagtgtgttctcatcatttttcaggcaggggaggtaagggaataagtcgggggactgaatggcggctgggcctcggatctctcctacaggtaacatgctgccacaggggaacctgccagttttatacatcaggtcatgtat

SEQ ID NO: 6325 - DNA, 2107 bp, Homo sapien; identical to SEQ ID NO: 886

SEQ ID NO: 6326 - protein, 591 aa, Homo sapien; identical to SEQ ID NO: 887

SEQ ID NO: 6327 - DNA, 934 bp, Homo sapien
tgagaagatgcaaccaatcctgcttctgctggccttcctcctgctgcccagggcagatgcaggggagatcatcgggggacatgaggccaagccccactcccgcccctacatggcttatcttatgatctgggatcagaagtctctgaagaggtgcggtggcttcctgatacaagacgacttcgtgctgacagctgctcactgttggggaagctccataaatgtcaccttgggggcccacaatatcaaagaacaggagccgacccagcagtttatccctgtgaaaagacccatcccccatccagcctataatcctaagaacttctccaacgacatcatgctactgcagctggagagaaaggccaagcggaccagagctgtgcagcccctcaggctacctagcaacaaggcccaggtgaagccagggcagacatgcagtgtggccggctgggggcagacggcccccctgggaaaacactcacacacactacaagaggtgaagatgacagtgcaggaagatcgaaagtgcgaatctgacttacgccattattacgacagtaccattgagttgtgcgtgggggacccagagattaaaaagacttcctttaagggggactctggaggccctcttgtgtgtaacaaggtggcccagggcattgtctcctatggacgaaacaatggcatgcctccacgagcctgcaccaaagtctcaagctttgtacactggataaagaaaaccatgaaacgctactaactacaggaagcaaactaagcccccgctgtaatgaaacaccttctctggagccaagtccagatttacactgggagaggtgccagcaactgaataaatacctctcccagtgtaaatctggagccaagtccagatttacactgggagaggtgccagcaactgaataaatacctcttagctgagtgg

SEQ ID NO: 6328 - protein, 247 aa, Homo sapien; identical to SEQ ID NO: 2403

SEQ ID NO: 6329 - DNA, 4154 bp, Homo sapien; identical to SEQ ID NO: 723

SEQ ID NO: 6330 - protein, 1147 aa, Homo sapien; identical to SEQ ID NO: 724

SEQ ID NO: 6331 - DNA, 726 bp, Homo sapien
atggcacagcacggggcgatgggcgcgtttcgggccctgtgcggcctggcgctgctgtgcgcgctcagcctgggtcagcgccccaccgggggtcccgggtgcggccctgggcgcctcctgcttgggacgggaacggacgcgcgctgctgccgggttcacacgacgcgctgctgccgcgattacccgggcgaggagtgctgttccgagtgggactgcatgtgtgtccagcctgaattccactgcggagacccttgctgcacgacctgccggcaccacccttgtcccccaggccagggggtacagtcccaggggaaattcagttttggcttccagtgtatcgactgtgcctcggggaccttctccgggggccacgaaggccactgcaaaccttggacagactgcacccagttcgggtttctcactgtgttccctgggaacaagacccacaacgctgtgtgcgtcccagggtccccgccggcagagccgcttgggtggctgaccgtcgtcctcctggccgtggccgcctgcgtcctcctcctgacctcggcccagcttggactgcacatctggcagctgaggagtcagtgcatgtggccccgagagacccagctgctgctggaggtgccgccgtcgaccgaagacgccagaagctgccagttccccgaggaagagcggggcgagcgatcggcagaggagaaggggcggctgggagacctgtgggtgtga

SEQ ID NO: 6332 - protein, 241 aa, Homo sapien; identical to SEQ ID NO: 4344

SEQ ID NO: 6333 - DNA, 1982 bp, Homo sapien; identical to SEQ ID NO: 918

SEQ ID NO: 6334 - protein, 465 aa, Homo sapien; identical to SEQ ID NO: 919

SEQ ID NO: 6335 - DNA, 827 bp, Homo sapien
gactgtctcagtggagctgggtcatctcaggccttggctccttgaacttttggccgccatgtgcttcccgaaggtcctctctgatgacatgaagaagctgaaggcccgaatgcaccaggccatagaaagattttatgataaaatgcaaaatgcagaatcaggacgtggacaggtgatgtcgagcctggcagagctggaggacgacttcaaagagggctacctggagacagtggcggcttattatgaggagcagcacccagagctcactcctctacttgaaaaagaaagagatggattacggtgccgaggcaacagatcccctgtcccggatgttgaggatcccgcaaccgaggagcctggggagagcttttgtgacaaggtcatgagatggttccaggccatgctgcagcggctgcagacctggtggcacggggttctggcctgggtgaaggagaaggtggtggccctggtccatgcagtgcaggccctctggaaacagttccagagtttctgctgctctctgtcagagctcttcatgtcctctttccagtcctacggagccccacggggggacaaggaggagctgacaccccagaagtgctctgaaccccaatcctcaaaatgaagatactgacaccacctttgccctccccgtcaccgcgcacccaccctgacccctccctcagctgtcctgtgccccgccctctcccgcacactcagtccccctgcctggcgttcctgccgcagctctgacctggtgctgtcgccctggcatcttaataaaacctgcttatacttccctggaaaaaaaaaaaaaaaaaaaaaaa

SEQ ID NO: 6336 - protein, 188 aa, Homo sapien
MCFPKVLSDDMKKLKARMHQAIERFYDKMQNAESGRGQVMSSLAELEDDFKEGYLETVAAYYEEQHPELTPLLEKERDGLRCRGNRSPVPDVEDPATEEPGESFCDKVMRWFQAMLQRLQTWWHGVLAWVKEKVVALVHAVQALWKQFQSFCCSLSELFMSSFQSYGAPRGDKEELTPQKCSEPQSSK

SEQ ID NO: 6337 - DNA, 2165 bp, Homo sapien
atgtatttccagtaccagatcatcatgaccatgatcgtccataagaactgggtggacctggcctgggccgtcagctactacatccggttcttcatcacctacatccctttctacggcatcctgggagccctccttttcctcaacttcatcaggttcctggagagccactggtttgtgtgggtcacacagatgaatcacatcgtcatggagattgaccaggaggcctaccgtgactggttcagtagccagctgacagccacctgcaacgtggagcagtccttcttcaacgactggttcagtggacaccttagcttgcagattgagcaccacctcttccccaccatgccccggcacaacttacacaagatcgccccgctggtgaagtctctatgtgccaagcatggcattgaataccaggagaagccgctactgagggccctgctggacatcatcaggtccctgaagaagtctgggaagctgtggctggacgcctaccttcacaaatgaagccacagcccccgggacactgtggggaaggggtgcaggtggggtgatggccagaggaatgatgggcctttgttctgaggggtgtccgagaggctggtgtatgcactgctcacggaccccatgttggatctttctccctttctcctctcctttttctcttcacatctcccccatagcaccctgccctcatgggacctgccctccctcagccgtcagccatcagccatggccctcccagtgcctcctagccccttcttccaaggagcagagaggtggccaccgggggtggctctgtcctacctccactctctgcccctaaagatgggaggagaccagcggtccatgggtctggcctgtgagtctccccttgcagcctggtcactaggcatcacccccgctttggttcttcagatgctcttggggttcataggggcaggtcctagtcgggcagggcccctgaccctcccggcctggcttcactctccctgacgactgccattggtccaccctttcatagagaggcctgctttgttacaaagctcgggtctccctcctgcagctcggttaagtacccgaggcctctcttaagatgtccagggccccaggcccgcgggcacagccagcccaaaccttgggccctggaagagtcctccaccccatcactagagtgctctgaccctgggctttcacgggccccattccaccgcctccccaacttgagcctgtgaccttgggaccaaagggggagtccctcgtctcttgtgactcagcagaggcagtggccacgttcagggaggggccggctggcctggaggctcagcccaccctccagcttttcctcagggtgtcctgaggtccaagattctggagcaatctgacccttctccaaaggctctgttatcagctgggcagtgccagccaacccctggccatttggccccaggggacgtgggccctgcaggctgcaggagggcactggagctgggaggtctcgtcccagccctccccatctcggggctgctgtgtggacggcgctgcctcaggcactctcctgtctgaacctgcccttactgtgtttaacctgttgctccaggatgcattctgataggagggggcggcagggctgggccttgtgacaatctgcctttcaccacatggccttgcctcggtggccctgactgtcagggagggccagggaggcagagcgggagggagtctcaggaggaggctgccctgaggggctggggagggggtacctcatgaggaccagggtggagctgagaagaggaggaggtgggggctggaggtgctggtagctgaggggacgggcaagtgagaggggagggagggaagtcctgggaggatcctgagctgctgttgcagtctaacccactaatcagttcttagattcaggggaagggcaggcaccaacaactcagaatgggggctttcggggagggcgcctagtccccccagctctaagcagccaggagggacctgcatctaagcatctgggttgccatggcaatggcatgccccccagctactgtatgcccccgacccccgcagaggcagaatgaacccatagggagctgatcgtaatgtttatcatgttacttccccacccctacattttttgaaataaaataaggaatttt

SEQ ID NO: 6338 - protein, 168 aa, Homo sapien [sequence omitted]

SEQ ID NO: 6339 - DNA, 2382 bp, Homo sapien
agtaccgctgcggccgggggattgggccggggtctccaccgccgaccgaggggagcggcgtccgctcggccctgctttttgcgacctgccgtcagccccacgtcgccggcctggaggggcgaagaggacgaggggcgcaaggcttcctccggggacattggctccctggattatcaagcagtttgtagttgacattgaatccaggctgaggatggaaggtgtggaacttaaagaagaatggcaagatgaagattttccgatacctttaccagaagatgatagtattgaagcagatatactagctataactggaccagaggaccagcctggctcactagaagttaatggaaataaagtgagaaagaaactaatggctccagacattagcctgacactggatcctagtgatggctctgtattgtcagatgatttggatgaaagtggggagattgacttagatggcttagacacaccgtcagagaatagtaatgagtttgagtgggaagatgatcttccaaaacccaagactactgaagtaattaggaaaggctcaattactgaatacacagcagcagaggaaaaagaagatggacgacgctggcgtatgttcaggattggagaacaggaccacagggttgatatgaaggcaattgaaccctataaaaaagttatcagccatgggggatattatggggatggattaaatgccattgttgtatttgctgtctgtttcatgcctgaaagtagtcagcctaactatagatacctgatggacaatctttttaaatatgttattggcactttggagctattagtagcagaaaactacatgatagtttatttaaatggtgcaacaactcgaagaaaaatgcccagtctgggatggctcaggaaatgttatcagcaaattgatagaaggttacggaaaaatctaaaatccctaatcattgtacatccttcttggtttatcagaacacttctggctgttacaagaccatttattagctcgaaattcagccaaaaaattagatacgtgtttaatttggcagaactagcagaacttgtccccatggaatacgttggcataccagaatgcataaaacaagttgatcaagaacttaatggaaaacaagatgaaccgaaaaatgaacagtaagtttggcatctagtccaaacaagactgaagaatgtgctgatggagcagtgctgtttctgcattcataatgcatttattggcccatatttttatgtaacctgttacaaaatagacttgactttttcataatggacttttgtattatacaagggactgttcactgctgtactggtttgcaaatttcttgaatttagctctttaatagctaactgtattattatcgttttatattttatattgctaaatagagaaccacactttatataaagtagtttttgcatttgtttattgaatgatgcatcttcttcggtgaaatatttatatgcataaatggcaaaggaaagaaataatatatatttttatgtcattgagcaatattttttcaatgtgtacctgtcttatggaagaaatatgcaggtatataagaccacgattttctaagctgccatataagaatttttgtttttgtaaatggttaaatacatttcctgggtaacttaggaaattaagctttttcataaggcaacagatggtaaactgattgtcatgaatacccaaagatcatgtatataatcgaagtgtattagtaccatcccaaggtttttttctcatttaacatatttgtttcataattcagcaagtacagatgcaagcgcattgcacactttttcctttctaaacttaaagacaagtcaaaaagccattcttagaactagaggatttaagcagggtcggaattacgggtttgtatatatgtatatactcgtttgtatatatgtatatactgggacattttatcttctggcccaaagtcagaactttataaaaatcttgagtttgttcacttaatgtgaaataagctatgtgtccagggtattgctcccctgagtgtatatgagtgctgagtagtattgcagagaatgtgatgagttatcactgtcacaactttttctatagaaaacaggggctgcttttaaactctcactatgggacactttaccaaaatacttccatatcaattatttgaacccggtagtttgtttgacctagttagattgtggtgtttattcaagtttgaaatcatgtttgacaatactgtaaattaggttaattttgaagtcttagcatcatcatattgtgctgttttggataacacgtttgttcaagaacatttaaactgtttctttggtgtcctttacattgaaataaattgtgtttgtgcctcc

SEQ ID NO: 6340 - protein, 314 aa, Homo sapien
MEGVELKEEWQDEDFPIPLPEDDSIEADILAITGPEDQPGSLEVNGNKVRKKLMAPDISLTLDPSDGSVLSDDLDESGEIDLDGLDTPSENSNEFEWEDDLPKPKTTEVIRKGSITEYTAAEEKEDGRRWRMFRIGEQDHRVDMKAIEPYKKVISHGGYYGDGLNAIVVFAVCFMPESSQPNYRYLMDNLFKYVIGTLELLVAENYMIVYLNGATTRRKMPSLGWLRKCYQQIDRRLRKNLKSLIIVHPSWFIRTLLAVTRPFISSKFSQKIRYVFNLAELAELVPMEYVGIPECIKQVDQELNGKQDEPKNEQ

SEQ ID NO: 6341 - DNA, 1337 bp, Homo sapien
gcggcggactcggcttgttgtgttgctgcctgagtgccggagacggtcctgctgctgccgcagtcctgccagctgtccgacgatgtcgtcccacctagtcgagccgccgccgcccctgcacaacaacaacaacaactgcgaggaaaatgagcagtctctgcccccgccggccggcctcaacagttcctgggtggagctacccatgaacagcagcaatggcaatgataatggcaatgggaaaaatggggggctggaacacgtaccatcctcatcctccatccacaatggagacatggagaagattcttttggatgcacaacatgaatcaggacagagtagttccagaggcagttctcactgtgacagcccttcgccacaagaagatgggcagatcatgtttgatgtggaaatgcacaccagcagggaccatagctctcagtcagaagaagaagttgtagaaggagagaaggaagtcgaggctttgaagaaaagtgcggactgggtatcagactggtccagtagacccgaaaacattccacccaaggagttccacttcagacaccctaaacgttctgtgtctttaagcatgaggaaaagtggagccatgaagaaagggggtattttctccgcagaatttctgaaggtgttcattccatctctcttcctttctcatgttttggctttggggctaggcatctatattggaaagcgactgagcacaccctctgccagcacctactgagggaaaggaaaagcccctggaaatgcgtgtgacctgtgaagtggtgtattgtcacagtagcttatttgaacttgagaccattgtaagcatgacccaacctaccaccctgtttttacatatccaattccagtaaccctcaaattcaatattttattcaaactctgttgaggcattttactaaccttataccctttttggcctgaagacattttagaatttcctaacagagtttactgttgtttagaaatttgcaagggcttcttttccgcaaatgccaccagcagattataattttgtcggcaatgctattatctctaattagtgccaccagactagacctgtatcattcatggtataaattttactcttccaacataactaccatctctctcttaaaacgagatcaggttagcaaatgatgtaaaagaagctttattgtctagttgttttttttcccccaagacaaaggcaagtttccctaagtttgagttgatagttattaaaaagaaaacaaaacaaaaaaaaaaggcaaggcacaacaaaaaaatatcctgggcaataaaaaaaatattttaaaccaaaaaaaaaaaaaaaa

SEQ ID NO: 6342 - protein, 219 aa, Homo sapien
MSSHLVEPPPPLHNNNNNCEENEQSLPPPAGLNSSWVELPMNSSNGNDNGNGKNGGLEHVPSSSSIHNGDMEKILLDAQHESGQSSSRGSSHCDSPSPQEDGQIMFDVEMHTSRDHSSQSEEEVVEGEKEVEALKKSADWVSDWSSRPENIPPKEFHFRHPKRSVSLSMRKSGAMKKGGIFSAEFLKVFIPSLFLSHVLALGLGIYIGKRLSTPSASTY

SEQ ID NO: 6343 - DNA, 983 bp, Homo sapien; identical to SEQ ID NO: 525

SEQ ID NO: 6344 - protein, 180 aa, Homo sapien; identical to SEQ ID NO: 526

SEQ ID NO: 6345 - DNA, 615 bp, Homo sapien
gaattccggccatgaagacccaaaggaatggccactccctggggcggtggtcactggtgctcctgctgctgggcctggtgatgcctctggccatcattgcccaggtcctcagctacaaggaagctgtccttcgtgctatagatggcatcaaccagcggtcctcggatgctaacctctaccgcctcctggacctggaccccaggcccacgatggatggggacccagacacgccaaagcctgtgagcttcacagtgaaggagacagtgtgccccaggacgacacagcagtcaccagaggattgtgacttcaagaaggacgggctggtgaagcggtgtatggggacagtgaccctcaaccaggccaggggctcctttgacatcagttgtgataaggataacaagagatttgccctgctgggtgatttcttccggaaatctaaagagaagattggcaaagagtttaaaagaattgtccagagaatcaaggattttttgcggaatcttgtacccaggacagagtcctagtgtgtgccctaccctggctcaggcttctgggctctgagaaataaactatgagagcaatttcaaaaaaaaaaaaaaaaaaaaaccggaattc

SEQ ID NO: 6346 - protein, 170 aa, Homo sapien
MKTQRNGHSLGRWSLVLLLLGLVMPLAIIAQVLSYKEAVLRAIDGINQRSSDANLYRLLDLDPRPTMDGDPDTPKPVSFTVKETVCPRTTQQSPEDCDFKKDGLVKRCMGTVTLNQARGSFDISCDKDNKRFALLGDFFRKSKEKIGKEFKRIVQRIKDFLRNLVPRTES

SEQ ID NO: 6347 - DNA, 2479 bp, Homo sapien
agtgcagacgcggctcctagcggatgggtgctattgtgaggcggttgtagaagttaataaaggtatccatggagaacactgaaaactcagtggattcaaaatccattaaaaatttggaaccaaagatcatacatggaagcgaatcaatggactctggaatatccctggacaacagttataaaatggattatcctgagatgggtttatgtataataattaataataagaattttcataaaagcactggaatgacatctcggtctggtacagatgtcgatgcagcaaacctcagggaaacattcagaaacttgaaatatgaagtcaggaataaaaatgatcttacacgtgaagaaattgtggaattgatgcgtgatgtttctaaagaagatcacagcaaaaggagcagttttgtttgtgtgcttctgagccatggtgaagaaggaataatttttggaacaaatggacctgttgacctgaaaaaaataacaaactttttcagaggggatcgttgtagaagtctaactggaaaacccaaacttttcattattcaggcctgccgtggtacagaactggactgtggcattgagacagacagtggtgttgatgatgacatggcgtgtcataaaataccagtggaggccgacttcttgtatgcatactccacagcacctggttattattcttggcgaaattcaaaggatggctcctggttcatccagtcgctttgtgccatgctgaaacagtatgccgacaagcttgaatttatgcacattcttacccgggttaaccgaaaggtggcaacagaatttgagtccttttcctttgacgctacttttcatgcaaagaaacagattccatgtattgtttccatgctcacaaaagaactctatttttatcactaaagaaatggttggttggtggttttttttagtttgtatgccaagtgagaagatggtatatttggtactgtatttccctctcattttgacctactctcatgctgcagagggtactttaagacatactccttccatcaaatagaaccactatgaagctacctcaaacttccagtcaggtagttgcaattgaattaaattaggaataaataaaaatggatactggtgcagtcattatgagaggcaatgattgttaatttacagctttcatgattagcaagttacagtgatgctgtgctatgaattttcaagtaattgtgaaaaagttaaacattgaagtaatgaatttttatgatattccccccacttaagactgtgtattctagttttgtcaaactgtagaaatgatgatgtggaagaacttaggcatctgtgggcatggtcaaaggctcaaacctttattttagaattgatatacacggatgacttaactgcattttagaccatttatctgggattatggttttgtgatgtttgtcctgaacacttttgttgtaaaaaaataataataataatgtttaatattgagaaagaaactaatattttatgtgagagaaagtgtgagcaaactaacttgacttttaaggctaaaacttaacattcatagaggggtggagttttaactgtaaggtgctacaatgcccctggatctaccagcataaatatcttctgatttgtccctatgcatatcagttgagcttcatataccagcaatatatctgaagagctattatataaaaaccccaaactgttgattattagccaggtaatgtgaataaattctataggaacatatgaaaatacaacttaaataataaacagtggaatataaggaaagcaataaatgaatgggctgagctgcctgtaacttgagagtagatggtttgagcctgagcagagacatgactcagcctgttccatgaaggcagagccatggaccacgcaggaagggcctacagcccatttctccatacgcactggtatgtgtggatgatgctgccagggcgccatcgccaagtaagaaagtgaagcaaatcagaaacttgtgaagtggaaatgttctaaaggtggtgaggcaataaaaatcatagtactctttgtagcaaaattcttaagtatgttattttctgttgaagtttacaatcaaaggaaaatagtaatgttttatactgtttactgaaagaaaaagacctatgagcacataggactctagacggcatccagccggaggccagagctgagcactcagcccgggaggcaggctccaggcctcagcaggtgcggagccgtcactgcaccaagtctcactggctgtcagtatgacatttcacgggagatttcttgttgctcaaaaaatgagctcgcatttgtcaatgacagtttcttttttcttactagacctgtaacttttgtaaatacacacagcatgtaatggtatcttaaagtgtgtttctatgtgacaattttgtacaaatttgttattttccatttttatttcaaaatatacattcaaacttaaaatt

SEQ ID NO: 6348 - protein, 277 aa, Homo sapien; identical to SEQ ID NO: 893

SEQ ID NO: 6349 - DNA, 4828 bp, Homo sapien
agtggcgtcggaactgcaaagcacctgtgagcttgcggaagtcagttcagactccagcccgctccagcccggcccgacccgaccgcacccggcgcctgccctcgctcggcgtccccggccagccatgggcccttggagccgcagcctctcggcgctgctgctgctgctgcaggtctcctcttggctctgccaggagccggagccctgccaccctggctttgacgccgagagctacacgttcacggtgccccggcgccacctggagagaggccgcgtcctgggcagagtgaattttgaagattgcaccggtcgacaaaggacagcctatttttccctcgacacccgattcaaagtgggcacagatggtgtgattacagtcaaaaggcctctacggtttcataacccacagatccatttcttggtctacgcctgggactccacctacagaaagttttccaccaaagtcacgctgaatacagtggggcaccaccaccgccccccgccccatcaggcctccgtttctggaatccaagcagaattgctcacatttcccaactcctctcctggcctcagaagacagaagagagactgggttattcctcccatcagctgcccagaaaatgaaaaaggcccatttcctaaaaacctggttcagatcaaatccaacaaagacaaagaaggcaaggttttctacagcatcactggccaaggagctgacacaccccctgttggtgtctttattattgaaagagaaacaggatggctgaaggtgacagagcctctggatagagaacgcattgccacatacactctcttctctcacgctgtgtcatccaacgggaatgcagttgaggatccaatggagattttgatcacggtaaccgatcagaatgacaacaagcccgaattcacccaggaggtctttaaggggtctgtcatggaaggtgctcttccaggaacctctgtgatggaggtcacagccacagacgcggacgatgatgtgaacacctacaatgccgccatcgcttacaccatcctcagccaagatcctgagctccctgacaaaaatatgttcaccattaacaggaacacaggagtcatcagtgtggtcaccactgggctggaccgagagagtttccctacgtataccctggtggttcaagctgctgaccttcaaggtgaggggttaagcacaacagcaacagctgtgatcacagtcactgacaccaacgataatcctccgatcttcaatcccaccacgtacaagggtcaggtgcctgagaacgaggctaacgtcgtaatcaccacactgaaagtgactgatgctgatgcccccaataccccagcgtgggaggctgtatacaccatattgaatgatgatggtggacaatttgtcgtcaccacaaatccagtgaacaacgatggcattttgaaaacagcaaagggcttggattttgaggccaagcagcagtacattctacacgtagcagtgacgaatgtggtaccttttgaggtctctctcaccacctccacagccaccgtcaccgtggatgtgctggatgtgaatgaagcccccatctttgtgcctcctgaaaagagagtggaagtgtccgaggactttggcgtgggccaggaaatcacatcctacactgcccaggagccagacacatttatggaacagaaaataacatatcggatttggagagacactgccaactggctggagattaatccggacactggtgccatttccactcgggctgagctggacagggaggattttgagcacgtgaagaacagcacgtacacagccctaatcatagctacagacaatggttctccagttgctactggaacagggacacttctgctgatcctgtctgatgtgaatgacaacgcccccataccagaacctcgaactatattcttctgtgagaggaatccaaagcctcaggtcataaacatcattgatgcagaccttcctcccaatacatctcccttcacagcagaactaacacacggggcgagtgccaactggaccattcagtacaacgacccaacccaagaatctatcattttgaagccaaagatggccttagaggtgggtgactacaaaatcaatctcaagctcatggataaccagaataaagaccaagtgaccaccttagaggtcagcgtgtgtgactgtgaaggggccgccggcgtctgtaggaaggcacagcctgtcgaagcaggattgcaaattcctgccattctggggattcttggaggaattcttgctttgctaattctgattctgctgctcttgctgtttcttcggaggagagcggtggtcaaagagcccttactgcccccagaggatgacacccgggacaacgtttattactatgatgaagaaggaggcggagaagaggaccaggactttgacttgagccagctgcacaggggcctggacgctcggcctgaagtgactcgtaacgacgttgcaccaaccctcatgagtgtcccccggtatcttccccgccctgccaatcccgatgaaattggaaattttattgatgaaaatctgaaagcggctgatactgaccccacagccccgccttatgattctctgctcgtgtttgactatgaaggaagcggttccgaagctgctagtctgagctccctgaactcctcagagtcagacaaagaccaggactatgactacttgaacgaatggggcaatcgcttcaagaagctggctgacatgtacggaggcggcgaggacgactaggggactcgagagaggcgggccccagacccatgtgctgggaaatgcagaaatcacgttgctggtggtttttcagctcccttcccttgagatgagtttctggggaaaaaaaagagactggttagtgatgcagttagtatagctttatactctctccactttatagctctaataagtttgtgttagaaaagtttcgacttatttcttaaagcttttttttttttcccatcactctttacatggtggtgatgtccaaaagatacccaaattttaatattccagaagaacaactttagcatcagaaggttcacccagcaccttgcagattttcttaaggaattttgtctcacttttaaaaagaaggggagaagtcagctactctagttctgttgttttgtgtatataattttttaaaaaaaatttgtgtgcttctgctcattactacactggtgtgtccctctgcctttttttttttttttaagacagggtctcattctatcggccaggctggagtgcagtggtgcaatcacagctcactgcagccttgtcctcccaggctcaagctatccttgcacctcagcctcccaagtagctgggaccacaggcatgcaccactacgcatgactaattttttaaatatttgagacggggtctccctgtgttacccaggctggtctcaaactcctgggctcaagtgatcctcccatcttggcctcccagagtattgggattacagacatgagccactgcacctgcccagctccccaactccctgccattttttaagagacagtttcgctccatcgcccaggcctgggatgcagtgatgtgatcatagctcactgtaacctcaaactctggggctcaagcagttctcccaccagcctcctttttatttttttgtacagatggggtcttgctatgttgcccaagctggtcttaaactcctggcctcaagcaatccttctgccttggccccccaaagtgctgggattgtgggcatgagctgctgtgcccagcctccatgttttaatatcaactctcactcctgaattcagttgctttgcccaagataggagttctctgatgcagaaattattgggctcttttagggtaagaagtttgtgtctttgtctggccacatcttgactaggtattgtctactctgaagacctttaatggcttccctctttcatctcctgagtatgtaacttgcaatgggcagctatccagtgacttgttctgagtaagtgtgttcattaatgtttatttagctctgaagcaagagtgatatactccaggacttagaatagtgcctaaagtgctgcagccaaagacagagcggaactatgaaaagtgggcttggagatggcaggagagcttgtcattgagcctggcaatttagcaaactgatgctgaggatgattgaggtgggtctacctcatctctgaaaattctggaaggaatggaggagtctcaacatgtgtttctgacacaagatccgtggtttgtactcaaagcccagaatccccaagtgcctgcttttgatgatgtctacagaaaatgctggctgagctgaacacatttgcccaattccaggtgtgcacagaaaaccgagaatattcaaaattccaaattttttcttaggagcaagaagaaaatgtggccctaaagggggttagttgaggggtagggggtagtgaggatcttgatttggatctctttttatttaaatgtgaatttcaacttttgacaatcaaagaaaagacttttgttgaaatagctttactgtttctcaagtgttttggagaaaaaaatcaaccctgcaatcactttttggaattgtcttgatttttcggcagttcaagctatatcgaatatagttctgtgtagagaatgtcactgtagttttgagtgtatacatgtgtgggtgctgataattgtgtattttctttgggggtggaaaaggaaaacaattcaagctgagaaaagtattctcaaagatgcatttttataaattttattaaacaattttgttaaaccataaaaaaaaaaaaa

SEQ ID NO: 6350 - protein, 882 aa, Homo sapien
MGPWSRSLSALLLLLQVSSWLCQEPEPCHPGFDAESYTFTVPRRHLERGRVLGRVNFEDCTGRQRTAYFSLDTRFKVGTDGVITVKRPLRFHNPQIHFLVYAWDSTYRKFSTKVTLNTVGHHHRPPPHQASVSGIQAELLTFPNSSPGLRRQKRDWVIPPISCPENEKGPFPKNLVQIKSNKDKEGKVFYSITGQGADTPPVGVFIIERETGWLKVTEPLDRERIATYTLFSHAVSSNGNAVEDPMEILITVTDQNDNKPEFTQEVFKGSVMEGALPGTSVMEVTATDADDDVNTYNAAIAYTILSQDPELPDKNMFTINRNTGVISVVTTGLDRESFPTYTLVVQAADLQGEGLSTTATAVITVTDTNDNPPIFNPTTYKGQVPENEANVVITTLKVTDADAPNTPAWEAVYTILNDDGGQFVVTTNPVNNDGILKTAKGLDFEAKQQYILHVAVTNVVPFEVSLTTSTATVTVDVLDVNEAPIFVPPEKRVEVSEDFGVGQEITSYTAQEPDTFMEQKITYRIWRDTANWLEINPDTGAISTRAELDREDFEHVKNSTYTALIIATDNGSPVATGTGTLLLILSDVNDNAPIPEPRTIFFCERNPKPQVINIIDADLPPNTSPFTAELTHGASANWTIQYNDPTQESIILKPKMALEVGDYKINLKLMDNQNKDQVTTLEVSVCDCEGAAGVCRKAQPVEAGLQIPAILGILGGILALLILILLLLLFLRRRAVVKEPLLPPEDDTRDNVYYYDEEGGGEEDQDFDLSQLHRGLDARPEVTRNDVAPTLMSVPRYLPRPANPDEIGNFIDENLKAADTDPTAPPYDSLLVFDYEGSGSEAASLSSLNSSESDKDQDYDYLNEWGNRFKKLADMYGGGEDD

SEQ ID NO: 6351 - DNA, 8694 bp, Homo sapien; identical to SEQ ID NO: 679

SEQ ID NO: 6352 - protein, 2442 aa, Homo sapien
MAENLLDGPPNPKRAKLSSPGFSANDSTDFGSLFDLENDLPDELIPNGGELGLLNSGNLVPDAASKHKQLSELLRGGSGSSINPGIGNVSASSPVQQGLGGQAQGQPNSANMASLSAMGKSPLSQGDSSAPSLPKQAASTSGPTPAASQALNPQAQKQVGLATSSPATSQTGPGICMNANFNQTHPGLLNSNSGHSLINQASQGQAQVMNGSLGAAGRGRGAGMPYPTPAMQGASSSVLAETLTQVSPQMTGHAGLNTAQAGGMAKMGITGNTSPFGQPFSQAGGQPMGATGVNPQLASKQSMVNSLPTFPTDIKNTSVTNVPNMSQMQTSVGIVPTQAIATGPTADPEKRKLIQQQLVLLLHAHKCQRREQANGEVRACSLPHCRTMKNVLNHMTHCQAGKACQVAHCASSRQIISHWKNCTRHDCPVCLPLKNASDKRNQQTILGSPASGIQNTIGSVGTGQQNATSLSNPNPIDPSSMQRAYAALGLPYMNQPQTQLQPQVPGQQPAQPQTHQQMRTLNPLGNNPMNIPAGGITTDQQPPNLISESALPTSLGATNPLMNDGSNSGNIGTLSTIPTAAPPSSTGVRKGWHEHVTQDLRSHLVHKLVQAIFPTPDPAALKDRRMENLVAYAKKVEGDMYESANSRDEYYHLLAEKIYKIQKELEEKRRSRLHKQGILGNQPALPAPGAQPPVIPQAQPVRPPNGPLSLPVNRMQVSQGMNSFNPMSLGNVQLPQAPMGPRAASPMNHSVQMNSMGSVPGMAISPSRMPQPPNMMGAHTNNMMAQAPAQSQFLPQNQFPSSSGAMSVGMGQPPAQTGVSQGQVPGAALPNPLNMLGPQASQLPCPPVTQSPLHPTPPPASTAAGMPSLQHTTPPGMTPPQPAAPTQPSTPVSSSGQTPTPTPGSVPSATQTQSTPTVQAAAQAQVTPQPQTPVQPPSVATPQSSQQQPTPVHAQPPGTPLSQAAASIDNRVPTPSSVASAETNSQQPGPDVPVLEMKTETQAEDTEPDPGESKGEPRSEMMEEDLQGASQVKEETDIAEQKSEPMEVDEKKPEVKVEVKEEEESSSNGTASQSTSPSQPRKKIFKPEELRQALMPTLEALYRQDPESLPFRQPVDPQLLGIPDYFDIVKNPMDLSTIKRKLDTGQYQEPWQYVDDVWLMFNNAWLYNRKTSRVYKFCSKLAEVFEQEIDPVMQSLGYCCGRKYEFSPQTLCCYGKQLCTIPRDAAYYSYQNRYHFCEKCFTEIQGENVTLGDDPSQPQTTISKDQFEKKKNDTLDPEPFVDCKECGRKMHQICVLHYDIIWPSGFVCDNCLKKTGRPRKENKFSAKRLQTTRLGNHLEDRVNKFLRRQNHPEAGEVFVRVVASSDKTVEVKPGMKSRFVDSGEMSESFPYRTKALFAFEEIDGVDVCFFGMHVQEYGSDCPPPNTRRVYISYLDSIHFFRPRCLRTAVYHEILIGYLEYVKKLGYVTGHIWACPPSEGDDYIFHCHPPDQKIPKPKRLQEWYKKMLDKAFAERIIHDYKDIFKQATEDRLTSAKELPYFEGDFWPNVLEESIKELEQEEEERKKEESTAASETTEGSQGDSKNAKKKNNKKTNKNKSSISRANKKKPSMPNVSNDLSQKLYATMEKHKEVFFVIHLHAGPVINTLPPIVDPDPLLSCDLMDGRDAFLTLARDKHWEFSSLRRSKWSTLCMLVELHTQGQDRFVYTCNECKHHVETRWHCTVCEDYDLCINCYNTKSHAHKMVKWGLGLDDEGSSQGEPQSKSPQESRRVSIQRCIQSLVHACQCRNANCSLPSCQKMKRVVQHTKGCKRKTNGGCPVCKQLIALCCYHAKHCQENKCPVPFCLNIKHKLRQQQIQHRLQQAQLMRRRMATMNTRNVPQQSLPSPTSAPPGTPTQQPSTPQTPQPPAQPQPSPVSMSPAGFPSVARTQPPTTVSTGKPTSQVPAPPPPAQPPPAAVEAARQIEREAQQQQHLYRVNINNSMPPGRTGMGTPGSQMAPVSLNVPRPNQVSGPVMPSMPPGQWQQAPLPQQQPMPGLPRPVISMQAQAAVAGPRMPSVQPPRSISPSALQDLLRTLKSPSSPQQQQQVLNILKSNPQLMAAFIKQRTAKYVANQPGMQPQPGLQSQPGMQPQPGMHQQPSLQNLNAMQAGVPRPGVPPQQQAMGGLNPQGQALNIMNPGHNPNMASMNPQYREMLRRQLLQQQQQQQQQQQQQQQQQQGSAGMAGGMAGHGQFQQPQGPGGYPPAMQQQQRMQQHLPLQGSSMGQMAAQMGQLGQMGQPGLGADSTPNIQQALQQRILQQQQMKQQIGSPGQPNPMSPQQHMLSGQPQASHLPGQQIATSLSNQVRSPAPVQSPRPQSQPPHSSPSPRIQPQPSPHHVSPQTGSPHPGLAVTMASSIDQGHLGNPEQSAMLPQLNTPSRSALSSELSLVGDTTGDTLEKFVEGL

SEQ ID NO: 6353 - DNA, 4289 bp, Homo sapien; identical to SEQ ID NO: 1728

SEQ ID NO: 6354 - protein, 387 aa, Homo sapien [sequence omitted]

SEQ ID NO: 6355 - DNA, 4010 bp, Homo sapien; identical to SEQ ID NO: 1416

SEQ ID NO: 6356 - protein, 1006 aa, Homo sapien; identical to SEQ ID NO: 1417

SEQ ID NO: 6357 - DNA, 1783 bp, Homo sapien
gggggctgtagctggtgagaggaagtcctagaggctatggacactctgctgctgggatcaccgagatgagcagcagctgctcagggctgagcagggtcctggtggccgtggctacagccctggtgtctgcctcctccccctgcccccaggcctggggccccccaggggtccagtatgggcagccaggcaggtccgtgaagctgtgttgtcctggagtgactgccggggacccagtgtcctggtttcgggatggggagccaaagctgctccagggacctgactctgggctagggcatgaactggtcctggcccaggcagacagcactgatgagggcacctacatctgccagaccctggatggtgcacttgggggcacagtgaccctgcagctgggctaccctccagcccgccctgttgtctcctgccaagcagccgactatgagaacttctcttgcacttggagtcccagccagatcagcggtttacccacccgctacctcacctcctacaggaagaagacagtcctaggagctgatagccagaggaggagtccatccacagggccctggccatgcccacaggatcccctaggggctgcccgctgtgttgtccacggggctgagttctggagccagtaccggattaatgtgactgaggtgaacccactgggtgccagcacacgcctgctggatgtgagcttgcagagcatcttgcgccctgacccaccccagggcctgcgggtagagtcagtaccaggttacccccgacgcctgcgagccagctggacataccctgcctcctggccgtgccagccccacttcctgctcaagttccgtttgcagtaccgtccggcgcagcatccagcctggtccacggtggagccagctggactggaggaggtgatcacagatgctgtggctgggctgccccatgctgtacgagtcagtgcccgggactttctagatgctggcacctggagcacctggagcccggaggcctggggaactccgagcactgggaccataccaaaggagataccagcatggggccagctacacacgcagccagaggtggagcctcaggtggacagccctgctcctccaaggccctccctccaaccacaccctcggctacttgatcacagggactctgtggagcaggtagctgtgctggcgtctttgggaatcctttctttcctgggactggtggctggggccctggcactggggctctggctgaggctgagacggggtgggaaggatggatccccaaagcctgggttcttggcctcagtgattccagtggacaggcgtccaggagctccaaacctgtagaggacccaggagggcttcggcagattccacctataattctgtcttgctggtgtggatagaaaccaggcaggacagtagatccctatggttggatctcagctggaagttctgtttggagcccatttctgtgagaccctgtatttcaaatttgcagctgaaaggtgcttgtacctctgatttcaccccagagttggagttctgctcaaggaacgtgtgtaatgtgtacatctgtgtccatgtgtgaccatgtgtctgtgaggcagggaacatgtattctctgcatgcatgtatgtaggtgcctggggagtgtgtgtgggtccttggctcttggcctttccccttgcaggggttgtgcaggtgtgaataaagagaataaggaagttcttggaaaaaaaaaaaaaaaaaaaaaaaaaaaaaaaaaaaaaaaaaaaaaaaaaaaaaacctcggg

SEQ ID NO: 6358 - protein, 422 aa, Homo sapien; identical to SEQ ID NO: 1443

SEQ ID NO: 6359 - DNA, 2067 bp, Homo sapien
ggaattccaatgaatgaatgaatgaatgagtgaatgaatcaacgaaggagtgagtcaaggcccgggaaccacagactccaagcctacgcagagcccgggaagggggattccggaggggcggggcctctttccggaagcgcccgccgggggcggggagggggcggggccatccgcgtgaggcgaccctgttggtccggaggggcggggcgaggaggaggacggccttgggcggttcggctgcccacagtaaccgctgggtggacctggccagcgctccgaaccttgtcctcgctgcgcgccggcccctcggagccccacagcccgggaaggaggcggccgcgggcggggcgcccgctctgccaagcggacccgcaacccggaaaggcggcgcggcggagcctggagccggatcctgctcagaccgggccccggccggccagagccgcgggcatgtcggaggcgcggaaggggccggacgaggcggaggagagccagtacgactctggcattgagtctctgcgctctctgcgctccctacccgagtccacctcggctccagcctccgggccctcggacggcagcccccagccctgcacccatcctccgggacccgtcaaggaaccacaggagaaggaagacgcggatggggagcgggctgattccacctatggctcctcctcgctcacctacaccctgtccttgctggggggccccgaggctgaggacccgcccccacgcctgccactcccccacgtgggggcgctgagccctcagcagctggaagcactcacttacatctccgaggacggagacacgctggtccacctggcagtgattcatgaggccccagcggtgctgctctgttgcctggctttgctgccccaggaggtcctggacattcaaaataacctttaccagacagcactccatctggctgtacatctggaccaaccgggcgcagttcgggcactggtgctgaagggggccagccgggcactacaggaccggcatggagacacagcccttcatgtggcctgccagcgccagtcttggcctgtgcccgctgcctgctggaagggcgggccagagccaggcagaggaacatctcactctctggacctccagctgcaaaactggcaaggtctggcttgtctccacattgccacccttcagaagaaccaaccactcatggaattgctgcttcggaatggagctgacattgatgtgcaggagggctccagtggtaagacagcgctgcacctggctgtggaaacccaagagcggggcctggtacagttcctgctccaggctggtgcccaggtagatgcccgcatgctgaacgggtgcacacccctgcacctggcagctggccggggtctcatgggcatctcatccactctgtgcaaggcgggtgctgactccctgctgcggaatgtggaggatgagacgccccaggacctgactgaggaatcccttgtccttttgccctttgatgacctgaagatctcagggaaactgctgctgtgtaccgactgaagccaggcagggtctgggatcctcagggctccacctctccatctggaagccggagccataactgctgcagtttgggcccaggctatgtgctcttctggtgccctagggactgctgtggccagagcctggggccagccagtacagtcctgagccgaggaggagggactgcaagtggaagagagccagtctggaaggaagagctttccaggtggacagggcttcttggaagacccccaaagccccaggtatcctgggtgaagcctgtttgcctctcttgaaaatggcaggtgctcttgttttacccatgttgggtcagcctgaaactgccaaccagtaggaagcatggactctcctgagtgagaagagactgaaataggagcaagcagaaccctgagaggtgtccatcttcttgctgttgaggaccctgaaacaccgttgtttaaagacttcacacagaaggctctgaactgagccactggggaagggaagtttcagtaacatgacactaaaatggcagagacgttaaaaaaa

SEQ ID NO: 6360 - protein, 500 aa, Homo sapien
MNQRRSESRPGNHRLQAYAEPGKGDSGGAGPLSGSARRGRGGGGAIRVRRPCWSGGAGRGGGRPWAVRLPTVTAGWTWPALRTLSSLRAGPSEPHSPGRRRPRAGRPLCQADPQPGKAARRSLEPDPAQTGPRPARAAGMSEARKGPDEAEESQYDSGIESLRSLRSLPESTSAPASGPSDGSPQPCTHPPGPVKEPQEKEDADGERADSTYGSSSLTYTLSLLGGPEAEDPPPRLPLPHVGALSPQQLEALTYISEDGDTLVHLAVIHEAPAVLLCCLALLPQEVLDIQNNLYQTALHLAVHLDQPGAVRALVLKGASRALQDRHGDTALHVACQRQSWPVPAACWKGGPEPGRGTSHSLDLQLQNWQGLACLHIATLQKNQPLMELLLRNGADIDVQEGSSGKTALHLAVETQERGLVQFLLQAGAQVDARMLNGCTPLHLAAGRGLMGISSTLCKAGADSLLRNVEDETPQDLTEESLVLLPFDDLKISGKLLLCTD

SEQ ID NO: 6361 - DNA, 4519 bp, Homo sapien
cagccagggccaccccaggggctataagagcaactagatttctggagcagctcggggatgggtgccatttgagcccagcttggctccccctcctggctggcctccttcctgcccttctgcctgcctgtgtctgctgagattctgcaaagaggaacgttggcaccatgtctctgctcaaccctgtcctgctgccccccaaggtgaaggcctatctgagccaaggggagcgcttcatcaaatgggatgatgaaactacagttgcctctccagttatcctccgtgtggatcctaagggctactacttatactggacgtatcaaagtaaggagatggagtttctggatatcaccagcatccgggatactcgctttgggaagtttgccaagatgcccaagagccagaagctccgggacgtcttcaacatggactttcctgataacagtttcctgctgaagacactcacggtggtgtccggcccggacatggtggacctcaccttccacaacttcgtctcctacaaggagaacgtgggcaaggcctgggctgaggacgtactggccctagtcaaacatccgctgacggccaacgcctcccgcagcaccttcctggacaagatccttgtgaagctcaagatgcagctcaactctgaagggaagattccggtgaagaactttttccagatgtttcctgctgaccgcaagcgggtggaagctgctctcagtgcctgccacctccccaaaggcaaaaatgacgccatcaatcctgaggacttcccagaacctgtctacaagagtttcctcatgagcctctgtcctcggccagaaatagatgagatcttcacttcttaccatgctaaggccaaaccctacatgacgaaggagcacctgaccaaattcatcaaccagaaacagcgggactcccggcttaactccctgctgttcccgccagcacggcctgaccaggtgcagggcctcatcgacaagtatgagcccagtggcatcaatgcacagaggggccagctgtcacctgaaggcatggtctggtttctctgtgggccagagaacagcgtgctggcccaggacaagctgctgctccaccacgacatgacgcagccactcaatcattacttcatcaactcgtcccacaacacctacctgacagccggccagttctcaggcctctcctcggctgagatgtaccgccaggtgctgctctctggctgccgttgcgtggagctagactgctggaaggggaaaccccctgacgaggagcccattatcacccatggcttcaccatgaccacagacatcttcttcaaagaagcaattgaggctattgcagaaagtgcctttaagacctccccctatcccatcatcctgtcgtttgagaaccatgtggactcaccccgccagcaggctaagatggctgagtattgccggacgatctttggggatatgctgctcacagagcccctggaaaagttcccactaaaaccaggtgtccccctgcccagccctgaggatctcaggggcaagatcctcatcaagaacaagaagaaccagttttctggccccacctcctccagtaaggataccggtggggaggctgagggcagcagcccacccagtgcccctgcagtgtgggctggcgaggaagggactgagctggaggaggaggaggtggaagaggaagaggaggaggagtcaggaaacctggatgaagaagagattaagaagatgcagtcggatgagggcacagcgggcctggaagtgacggcttatgaggagatgtccagcctagtcaattacatccagcccaccaagttcgtctcctttgagttctctgcccaaaagaaccgaagttatgtcatctcgtccttcacagagctcaaggcatatgacctgctctccaaggcctcggtgcagtttgtggactacaacaagcgccagatgagccgcatttaccccaagggaacccgcatggactcctccaactacatgccccagatgttctggaatgctggatgccagatggttgccctcaacttccagacgatggacttgcccatgcagcagaacatggcagtatttgagttcaacgggcagagcggctacctcctcaagcatgagttcatgcgccggccggacaagcagttcaaccccttctcagtggaccgcatcgacgtggtggtggccaccaccctttccattacggtgatctctgggcagttcctgtcagaacgcagcgtgcgcacctatgtagaagtggagctgtttggccttcctggggaccccaagaggcgctatcgaactaagctgtcacccagtactaactccatcaatcctgtctggaaggaggagccctttgtctttgagaagatcttgatgcctgagctggcctccctcagagtggctgtgatggaggaaggcaacaagtttcttggacaccgcatcatccccatcaatgccctaaattctgggtaccaccacctgtgcctgcacagtgagagcaacatgcccctcaccatgcctgcgctcttcatcttcctggagatgaaggactacatacctggtgcttgggcagatctcactgtggccctcgccaaccccattaagttcttcagtgcccatgacacgaagtctgtgaagctcaaggaggccatgggaggtctgcctgagaagcccttcccactggcgagtccagttgccagccaggtcaatggggcgttggccccaacgagcaatgggtcaccagcagccagggccggggccagggaagaggctatgaaagaagctgcggagccgcggaccgccagcctggaggagctccgggagctaaagggcgtggtgaagctgcagcggcggcacgagaaggagctgcgagagttggagcggcgcggagcgcggcgctgggaggagctgctgcagcggggcgcggcgcagctggcggagctcgggccaccgggcgtggggggcgtcggggcctgcaagctcggtcccggcaagggctctcgcaagaagaggagcctgccccgcgaggagagcgccggagccgcgccgggcgagggccctgagggcgtggacgggcgcgtgcgggagctgaaagacaggctggagctggagctgctgcggcagggcgaggagcagtacgagtgcgttctgaagcgcaaggagcagcacgtggccgagcaaatctccaaaatgatggagctggccagagagaaacaggcggcagagctgaaggccctgaaggagacgtcggagaacgacaccaaagagatgaagaaaaagctggagacaaagagactggagcggatccagggcatgaccaaagtcaccacagacaagatggcccaggagaggttgaagagagagattaacaactcccacatccaggaagtagtgcaggtgatcaagcagatgacggagaacttggagaggcaccaggagaagctggaggagaagcaggcggcttgcctggaacagatacgggagatggaaaagcagttccagaaggaggcgctggcagagtacgaggccaggatgaagggtctggaggcagaggtgaaggagtcggtgagggcctgcctcaggacctgctttccctccgaggccaaggacaagcctgagagggcctgcgagtgccccccagagctgtgtgagcaggacccactcatagcaaaggcagatgcccaggagagccgcctctgatgcccccatcccactgggacatttagcaaggaggttcagccccttctctgggatgtggttctattcccccaggaaaaaggagccccagccttctgaggctgtgggaacctgtggctgccttggacgctgcagccccctcctcaacggccaggccagagtctgagacaggacccaggcaccctcacggcagggcctctctggggcctagaagtcttctcaagctgacttcctacctccccctccatctctagataagtgtcatatatttgttgagggcaaaagactatggactggaaggcagaaagtgggatcctggccccactctgcctttcctattgagcaaccagctctgggctcagtttcctcacctggagggttggacccactcacctccactctagccccgaaccctcctgccccaggcttccaggccccatcaggcctgccctgagttggccttgtccactccttgaggcagatcctggcactacctcacagctccctggggacggccactccctggctgagggccctcccctcccctctgcctgtccggaacgggaggctgaaatggaaaagctgccttggccctgcttggctgagtcacaaggggcagtgggctcttgggtgctgttccaccctgaccctggctcacccctcttcctaggcctgggggcaggcagttcctaccatgtacccctctcaggctgcctgcctgacaaggtcagcatcatttgctctcctgaatttatgaggtttatttatttttctctttcctactcctattaaagaacctcgtcccagtgaaa

SEQ ID NO: 6362 - protein, 1181 aa, Homo sapien
MSLLNPVLLPPKVKAYLSQGERFIKWDDETTVASPVILRVDPKGYYLYWTYQSKEMEFLDITSIRDTRFGKFAKMPKSQKLRDVFNMDFPDNSFLLKTLTVVSGPDMVDLTFHNFVSYKENVGKAWAEDVLALVKHPLTANASRSTFLDKILVKLKMQLNSEGKIPVKNFFQMFPADRKRVEAALSACHLPKGKNDAINPEDFPEPVYKSFLMSLCPRPEIDEIFTSYHAKAKPYMTKEHLTKFINQKQRDSRLNSLLFPPARPDQVQGLIDKYEPSGINAQRGQLSPEGMVWFLCGPENSVLAQDKLLLHHDMTQPLNHYFINSSHNTYLTAGQFSGLSSAEMYRQVLLSGCRCVELDCWKGKPPDEEPIITHGFTMTTDIFFKEAIEAIAESAFKTSPYPIILSFENHVDSPRQQAKMAEYCRTIFGDMLLTEPLEKFPLKPGVPLPSPEDLRGKILIKNKKNQFSGPTSSSKDTGGEAEGSSPPSAPAVWAGEEGTELEEEEVEEEEEEESGNLDEEEIKKMQSDEGTAGLEVTAYEEMSSLVNYIQPTKFVSFEFSAQKNRSYVISSFTELKAYDLLSKASVQFVDYNKRQMSRIYPKGTRMDSSNYMPQMFWNAGCQMVALNFQTMDLPMQQNMAVFEFNGQSGYLLKHEFMRRPDKQFNPFSVDRIDVVVATTLSITVISGQFLSERSVRTYVEVELFGLPGDPKRRYRTKLSPSTNSINPVWKEEPFVFEKILMPELASLRVAVMEEGNKFLGHRIIPINALNSGYHHLCLHSESNMPLTMPALFIFLEMKDYIPGAWADLTVALANPIKFFSAHDTKSVKLKEAMGGLPEKPFPLASPVASQVNGALAPTSNGSPAARAGAREEAMKEAAEPRTASLEELRELKGVVKLQRRHEKELRELERRGARRWEELLQRGAAQLAELGPPGVGGVGACKLGPGKGSRKKRSLPREESAGAAPGEGPEGVDGRVRELKDRLELELLRQGEEQYECVLKRKEQHVAEQISKMMELAREKQAAELKALKETSENDTKEMKKKLETKRLERIQGMTKVTTDKMAQERLKREINNSHIQEVVQVIKQMTENLERHQEKLEEKQAACLEQIREMEKQFQKEALAEYEARMKGLEAEVKESVRACLRTCFPSEAKDKPERACECPPELCEQDPLIAKADAQESRL

SEQ ID NO: 6363 - DNA, 1061 bp, Homo sapien
agacaaaaagtaaccttcctgaagaggacatgtgattggaagttgtcaattgttgaagcattggtaactccagtctctaacgttttagaaaatcataacaagcggttctgtaccctgtaaagaacagaaacctggaaatctaaggctcaaagacatccaagtaattggtatctgggagatttgggattcaaacccagctctgcttgacttggtgaactactgagttcttcattatgtctgatggagattatgattacctcatcaagtttttagctttgggagactctggtgtagggaagaccagtgtactttaccaatatacagatggtaaatttaactccaaatttatcacaacagtgggcattgatttcaggccaaaaagagtggtgtacagagccagtgggccggatggaccagtaggtagaggccagagaatccacctgcagttatgggacacagcagggcaggagaggtttcgtagcttaacgacagcgttcttcagagatgctatgggttttcttctactttttgatctgacaaatgagcaaagtttcctcaatgtcagaaactggataagccagctacagatgcatgcatattgtgaaaacccagatatagtgctgtgtggaaacaagagtgatctggaggaccagagagtagtgaaagaggaggaagccatagcactcgcagagaaatatggaatcccctactttgaaactagtgctgccaatgggacaaacataagccaagcaattgagatgcttctggacctgataatgaagcgaatggaacggtgtgtggacaagtcctggattcctgaaggagtggtgcgatcaaatggtcatgcctctacggatcagttaagtgaagaaaaggagaaaggggcatgtggctgttgagaagtcaagtaacgacatagtagttcaggtggcccatgcctgggatcttctctatgattgatacatggcacagtgagagattaatgggcattgtgtacaaattgcttctcaccatccccattagacctacgaataaagcatccggttctaaaattaaaaaaa

SEQ ID NO: 6364 - protein, 221 aa, Homo sapien
MSDGDYDYLIKFLALGDSGVGKTSVLYQYTDGKFNSKFITTVGIDFRPKRVVYRASGPDGPVGRGQRIHLQLWDTAGQERFRSLTTAFFRDAMGFLLLFDLTNEQSFLNVRNWISQLQMHAYCENPDIVLCGNKSDLEDQRVVKEEEAIALAEKYGIPYFETSAANGTNISQAIEMLLDLIMKRMERCVDKSWIPEGVVRSNGHASTDQLSEEKEKGACGC

SEQ ID NO: 6365 - DNA, 764 bp, Homo sapien
atgtgctgtaccaagagtttgctcctggctgctttgatgtcagtgctgctactccacctctgcggcgaatcagaagcagcaagcaactttgactgctgtcttggatacacagaccgtattcttcatcctaaatttattgtgggcttcacacggcagctggccaatgaaggctgtgacatcaatgctatcatctttcacacaaagaaaaagttgtctgtgtgcgcaaatccaaaacagacttgggtgaaatatattgtgcgtctcctcagtaaaaaagtcaagaacatgtaaaaactgtggcttttctggaatggaattggacatagcccaagaacagaaagaaccttgctggggttggaggtttcacttgcacatcatggagggtttagtgcttatctaatttgtgcctcactggacttgtccaattaatgaagttgattcatattgcatcatagtttgctttgtttaagcatcacattaaagttaaactgtattttatgttatttatagctgtaggttttctgtgtttagctatttaatactaattttccataagctattttggtttagtgcaaagtataaaattatatttgggggggaataagattatatggacttttttgcaagcaacaagctattttttaaaammaactatttaacattcttttgtttatattgttttgtctcctaaattgttgtaattgcattataaaataagaaaaatattaataagacaaatattgaaaataaagaaacaaaaagtt

SEQ ID NO: 6366 - protein, 96 aa, Homo sapien; identical to SEQ ID NO: 1623

SEQ ID NO: 6367 - DNA, 2348 bp, Homo sapien
ctgcaggaggagtgtgactatgtgcagatgatcgaggtgcagcacaagcagtgcctggaggaggcccagctggagaatgagacaataggctgcagcaagatgtgggacaacctcacctgctggccagccacccctcggggccaggtagttgtcttggcctgtcccctcatcttcaagctcttctcctccattcaaggccgcaatgtaagccgcagctgcaccgacgaaggctggacgcacctggagcctggcccgtaccccattgcctgtggtttggatgacaaggcagcgagtttggatgagcagcagaccatgttctacggttctgtgaagaccggctacaccattggctacggcctgtccctcgccacccttctggtcgccacagctatcctgagcctgttcaggaagctccactgcacgcggaactacatccacatgcacctcttcatatccttcatcctgagggctgccgctgtcttcatcaaagacttggccctcttcgacagcggggagtcggaccagtgctccgagggctcggtgggctgtaaggcagccatggtctttttccaatattgtgtcatggctaacttcttctggctgctggtggagggcctctacctgtacaccctgcttgccgtctccttcttctctgagcggaagtacttctgggggtacatactcatcggctggggggtacccagcacattcaccatggtgtggaccatcgccaggatccattttgaggattatgggtgctgggacaccatcaactcctcactgtggtggatcataaagggccccatcctcacctccatcttggtaaacttcatcctgtttatttgcatcatccgaatcctgcttcagaaactgcggcccccagatatcaggaagagtgacagcagtccatactcaaggctagccaggtccacactcctgctgatccccctgtttggagtacactacatcatgttcgccttctttccggacaattttaagcctgaagtgaagatggtctttgagctcgtcgtggggtctttccagggttttgtggtggctatcctctactgcttcctcaatggtgaggtgcaggcggagctgaggcggaagtggcggcgctggcacctgcagggcgtcctgggctggaaccccaaataccggcacccgtcgggaggcagcaacggcgccacgtgcagcacgcaggtttccatgctgacccgcgtcagcccaggtgcccgccgctcctccagcttccaagccgaagtctccctggtctgaccaccaggatcccaggggcccaaggcgctccgccccttccactcaccccggcagacgagcagaggcctgcccgggcgcggccagccccggccctgggctcggaggctgcccccggccccctggtctctggtccggacactcctagagaacgcagccctagagcctgcctggagcgtttctagcaagtgagagagatgggagctcctctcctggagattcgaggtggaactcagtcattagactcctcctccaaaggccccctacgccaatcaagggcaaaaagtctacatactttcatcctgactctgccccctgctggctcttctgcccaattggaggaaagcaaccggtggatcctcaaacaacactggtgtgacctgagggcagaaaggttctgcccgggaaggtcaccagcaccaacaccacggtagtgcctgaaatttcaccattgctgtcaagttcctttgggttaagcattaccactcaggcatttgactgaagatgcagctcactaccccattctctctttacgcttagctatcagcttttcaaagtgggttattctggagtttttgtttggagagcacacctatcttagtggttcccaccgaagtggactggcccctgggtcagtctggtgggaggacggtgcaacccaaggactgagggactctgaagcctctggaaatgagaaggcagccaccagcgaatgctaggtctcagactaagcctacctgctctccaagtctcagtggcttcatctgtcaagtgggatctgtcacaccagccatacttatctctctgtgctgtggaagcaacaggaatcaagagctgccctccttgtccacccacctatgtgccaactgttgtaactaggctcagagatgtgcacccatgggctctgacagaaagcagatacctcaccctgctacacatacaggatttgaactcagatctgtctgataggaatgtgaaagcacagactcttactgctaacttttgtgtatcgtaaccagccagatcctcttggttatttgtttaccacttgtattattaatgccattatccct

SEQ ID NO: 6368 - DNA, 1360 bp, Homo sapien; identical to SEQ ID NO: 888

SEQ ID NO: 6369 - protein, 174 aa, Homo sapien; identical to SEQ ID NO: 889

SEQ ID NO: 6370 - DNA, 1627 bp, Homo sapien
gcccccaccatcaaggggaagaaagtgctcttcggattccggttcgccctggcctcccgcagccgccgcgggaccggcccccagcacacccccggggcgccgggcgcggggcagccgcccggacgcgcgcgggcctcaggcgccgccgggaccccagccccccaaactttggcaagttgcgggcgccgagcgcacccggaggcgcggggcgcggccgcaggcggagccgccccctgacgccgggccgccccctcccggccccggccgccccgccggctccgcggaaagtttgcggccgcccctgcgccgcacccggggcctgggtgagactgcggcggcggcagggcgcggacggccatatttgccggcgcggcccgagccgccgacaacaaaaagtgcgcgggcgctcggcgggcgctcggacgggcgcggggctgcagcgctaccgcccggcctcgccgccgccgccgccgccctcgcggcctggccccgccgcgcccggcgcgcccgccgcccggggggatgtcttacaaaccgaacttggccgcgcacatgcccgccgccgccctcaacgccgctgggagtgtccactcgccttccaccagcatggcaacgtcttcacagtaccgccagctgctcagtgactacgggccaccgtccctaggctacacccagggaactgggaacagccaggtgccccaaagcaaatacgcggagctgctggccatcattgaagagctggggaaggagatcagacccacgtacgcagggagcaagagtgccatggagaggctgaagcgcggcatcattcacgctagaggactggttcgggagtgcttggcagaaacggaacggaatgccagatcctagctgccttgttggttttgaaggatttccatctttttacaagatgagaagttacagttcatctcccctgttcagatgaaacccttgttttcaaaatggttacagtttcgtttttcctcccatggttcacttggctctgaacctacagtctcaaagattgagaaaagattttgcagttaattaggatttgcattttaagtagttaggaactgcccaggttttttttgttttttaagcattgatttaaaagatgcacggaaagttatcttacagcaaactgtagtttgcctccaagacaccattgtctccctttaatcttctcttttgtatacatttgttacccatggtgttctttgttccttttcataagctaataccactgtagggattttgttttgaacgcatattgacagcacgctttacttagtagccggttcccatttgccatacaatgtaggttctgcttaatgtaacttcttttttgcttaagcatttgcatgactattagtgcttcaaagtcaatttttaaaaatgcacaagttataaatacagaagaaagagcaacccaccaaacctaacaaggacccccgaacactttcatactaagactgtaagtagatctcagttctgcgtttattgtaagttgataaaaacatctggaagaaaatgactaaaactgtttgcatctttgtatgtatttattacttgatgtaataaagcttattttcattaacaatttgtattaaaaaaaaaaaaaaaa

SEQ ID NO: 6371 - protein, 115 aa, Homo sapien
MSYKPNLAAHMPAAALNAAGSVHSPSTSMATSSQYRQLLSDYGPPSLGYTQGTGNSQVPQSKYAELLAIIEELGKEIRPTYAGSKSAMERLKRGIIHARGLVRECLAETERNARS

SEQ ID NO: 6372 - DNA, 2034 bp, Homo sapien
aaaccttggccatggtcacttcctcttttccaatctctgtggcagtttttgccctaataaccctgcaggttggtactcaggacagttttatagctgcagtgtatgaacatgctgtcattttgccaaataaaacagaaacaccagtttctcaggaggatgccttgaatctcatgaacgagaatatagacattctggagacagcgatcaagcaggcagctgagcagggtgctcgaatcattgtgactccagaagatgcactttatggatggaaatttaccagggaaactgttttcccttatctggaggatatcccagaccctcaggtgaactggattccgtgtcaagacccccacagatttggtcacacaccagtacaagcaagactcagctgcctggccaaggacaactctatctatgtcttggcaaatttgggggacaaaaagccatgtaattcccgtgactccacatgtcctcctaatggctactttcaatacaataccaatgtggtgtataatacagaaggaaaactcgtggcacgttaccataagtaccacctgtactctgagcctcagtttaatgtccctgaaaagccggagttggtgactttcaacaccgcatttggaaggtttggcattttcacgtgctttgatatattcttctatgatcctggtgttaccctggtgaaagatttccatgtggacaccatactgtttcccacagcttggatgaacgttttgccccttttgacagctattgaattccattcagcttgggcaatgggaatgggagttaatcttcttgtggccaacacacatcatgtcagcctaaatatgacaggaagtggtatttatgcaccaaatggtcccaaagtgtatcattatgacatgaagacagagttgggaaaacttctcctttcagaggtggattcacatcccctatcctcgcttgcctacccaacagctgttaattggaatgcctacgccaccaccatcaaaccatttccagtacagaaaaacactttcaggggatttatttccagggatgggttcaacttcacagaactttttgaaaatgcaggaaaccttacagtctgtcaaaaggagctttgctgtcatttaagctacagaatgttacaaaaagaagagaatgaagtatacgttctaggagcttttacaggattacatggccgaaggagaagagagtactggcaggtctgcacaatgctgaagtgcaaaactactaatttgacaacttgtggacggccagtagaaactgcttctacaagatttgaaatgttctccctcagtggcacatttggaacagagtatgtttttcctgaagtgctacttaccgaaattcatctgtcacctggaaaatttgaggtgctgaaagatgggcgtttggtaaacaagaatggatcatctgggcctatactaacagtgtcactctttgggaggtggtacacaaaggactcactttacagctcatgtgggaccagcaattcagcaataacttacctgctaatattcatattattaatgatcatagctttgcaaaatattgtaatgttatagggcgtctctttatcactcagcttctgcatcatatgcttggctgaatgtgtttatcggcttcccaagtttactaagaaactttgaagggctatttcagtagtatagaccagtgagtcctaaatattttttctcatcaataattattttttaagtattatgataatgttgtccatttttttggctactctgaaatgttgcagtgtggaacaatggaaagagcctgggtgtttgggtcagataaatgaagatcaaactccagctccagcctcatttgcttgagactttgtgtgtatgggggacttgtatgtatgggagtgaggagtttcagggccattgcaaacatagctgtgcccttgaagagaatagtaatgatgggaatttagaggtttatgactgaattccctttgacattaaagactatttgaattcaaaaaaaaaaaaaaaaaaaaaaaaaaaaaaa

SEQ ID NO: 6373 - protein, 520 aa, Homo sapien
MVTSSFPISVAVFALITLQVGTQDSFIAAVYEHAVILPNKTETPVSQEDALNLMNENIDILETAIKQAAEQGARIIVTPEDALYGWKFTRETVFPYLEDIPDPQVNWIPCQDPHRFGHTPVQARLSCLAKDNSIYVLANLGDKKPCNSRDSTCPPNGYFQYNTNVVYNTEGKLVARYHKYHLYSEPQFNVPEKPELVTFNTAFGRFGIFTCFDIFFYDPGVTLVKDFHVDTILFPTAWMNVLPLLTAIEFHSAWAMGMGVNLLVANTHHVSLNMTGSGIYAPNGPKVYHYDMKTELGKLLLSEVDSHPLSSLAYPTAVNWNAYATTIKPFPVQKNTFRGFISRDGFNFTELFENAGNLTVCQKELCCHLSYRMLQKEENEVYVLGAFTGLHGRRRREYWQVCTMLKCKTTNLTTCGRPVETASTRFEMFSLSGTFGTEYVFPEVLLTEIHLSPGKFEVLKDGRLVNKNGSSGPILTVSLFGRWYTKDSLYSSCGTSNSAITYLLIFILLMIIALQNIVML

SEQ ID NO: 6374 - DNA, 3121 bp, Homo sapien
ggcacgaggccagggcccgggatcgccgagcccgacctcgggcgccccgccggtcacctccgcgcggacaccagccctgcagagcccagggagatggaagacttcgcccgaggggcggcctccccaggcccctcccggcctggcctggttcccgtcagcatcatcggggctgaggatgaggattttgagaacgagctggagacaaactcagaagagcaaaacagccagttccagagcctggagcaggtgaagcggcgcccagcccacctcatggccctcctgcagcacgtggccctgcagtttgagccaggacccctggttctccgggtgccggtccctcccaacgtcgcctttgaacttgaccgcactagggctgacctcatctccgaggatgtccagcggcggttcgtgcaggaggtggtgcaaagccagcaggtagccgtgggccggcagctggaggacttccgttccaagcggctcatgggcatgacgccctgggagcaggagctggcccagctggaggcttgggttgggcgggaccgagccagctacgaggcccgggagcggcacgtggcggagcggctgctcatgcacctggaggagatgcaacataccatctctaccgacgaagaaaagagtgctgccgtggtcaacgccattggcctgtacatgcgccaccttggggtgcggaccaagagtggagacaagaagtcggggaggaacttcttccggaaaaaggtgatggggaaccggcggtcggacgagcctgccaagaccaagaaggggctgagcagcatcctggatgccgcccgctggaaccggggagagccccaggttccagattttcgacacctcaaagcagaggttgatgccgagaagccaggtgctacagaccggaagggaggcgtggggatgccctctcgggaccggaatatcggggctcctgggcaggacacccctggagtctctctgcaccctctgtccctggacagcccagaccgggaaccaggtgctgacgcccccctggagctgggggactcatccccgcagggcccaatgagcctggagtccttggcgcccccagagagtaccgacgagggggccgaaaccgagagccccgagcctggagatgagggggagccggggcggtcgggactggagcttgaaccagaagagcctcccggctggcgggaactcgtccccccagacaccctgcacagcctgcccaagagccaggtgaagcggcaggaggtcatcagcgagctgctggtgacagaggcggcccacgtgcgcatgctgcgggtgctgcacgacctcttcttccagcccatggcagaatgcctgttcttccccttggaggagctgcagaacatcttccccagcctggacgagctcatcgaggtgcattccctgttcctcgatcgcctgatgaagcggaggcaggagagtggctacctcatcgaggagatcggagacgtgctgctggcccggtttgatggtgctgagggctcctggttccagaaaatctcctcccgcttctgcagccgccagtcatttgccttagagcagctcaaagccaagcaacgcaaggaccctcggttctgtgccttcgtgcaggaagctgagagccgcccgcggtgccgccgcctgcagctgaaggacatgatccccacggagatgcagcggctgaccaagtaccccctgctcctgcagagcatcgggcagaacacagaagagcccacagaacgggagaaagtggagctggcagccgagtgctgccgggaaattctacaccacgtcaaccaagccgtgcgtgacatggaggacctgctgaggctcaaggactatcagcggcgcctggacttgtcccaccttcggcagagcagcgaccctatgctgagcgagttcaagaacctggacatcaccaagaagaaattggtccacgagggcccactgacgtggcgggtgactaaggacaaggcagtggaggtgcatgtgctgctgctggacgacctgctgctgctgctccagcgccaggacgagcggctgctgctcaagtcccatagccggacactgacgcccacgcccgatggcaagaccatgctgcggcccgtgctgcggctcacctccgccatgacccgcgaggtggccaccgatcacaaagccttctacgtcctttttacctgggaccaggaggcccagatatacgagctggtggcacagactgtgtcggagcggaaaaactggtgtgctctcatcactgagactgccggatccctgaaagtccctgcccctgcctctcgccctaagccccggcccagcccgagcagcacccgagaacccctcctcagcagctctgagaacggcaatggtggccgagagacgtctccagctgatgcccggaccgagagaatcctcagtgacctcctgcccttctgcagaccaggccccgagggccagctcgctgccacggcccttcggaaagtgctgtccctgaagcagcttctgtttccggcggaggaagacaatggggcggggcctcctcgagatggggatggggtcccagggggcggccccctgagcccagcacggacccaggaaatccaggagaacctgctcagcttggaggagaccatgaagcagctggaggagttggaggaggaattttgccgcctgagacccctcctgtctcagcttggggggaactctgtcccccagcctggctgcacttgaggttcccgcccaggaaggccttttgcaagaaggagaggaatgggggagaggacgtgagggaccacccccacccacacagctgccgcagcatctcacaccccgagggcctgaggagagggagctgtgggccacgcctgggaggggcccagctggggttactggccccgcatgagcctcggccatctctccctcctgccctctgcttgggggactcagggctccattctggagggcaccacggtgacccgggccatctcagtattgcctgtgggggccacccctccacccccacccccaagtgccttcgctctgtttttataccctgaattggaggtttattttttaatatatattatctaagaagaaaaaaaaaaaaaaaaaaaaaaaa

SEQ ID NO: 6375 - protein, 879 aa, Homo sapien
MEDFARGAASPGPSRPGLVPVSIIGAEDEDFENELETNSEEQNSQFQSLEQVKRRPAHLMALLQHVALQFEPGPLVLRVPVPPNVAFELDRTRADLISEDVQRRFVQEVVQSQQVAVGRQLEDFRSKRLMGMTPWEQELAQLEAWVGRDRASYEARERHVAERLLMHLEEMQHTISTDEEKSAAVVNAIGLYMRHLGVRTKSGDKKSGRNFFRKKVMGNRRSDEPAKTKKGLSSILDAARWNRGEPQVPDFRHLKAEVDAEKPGATDRKGGVGMPSRDRNIGAPGQDTPGVSLHPLSLDSPDREPGADAPLELGDSSPQGPMSLESLAPPESTDEGAETESPEPGDEGEPGRSGLELEPEEPPGWRELVPPDTLHSLPKSQVKRQEVISELLVTEAAHVRMLRVLHDLFFQPMAECLFFPLEELQNIFPSLDELIEVHSLFLDRLMKRRQESGYLIEEIGDVLLARFDGAEGSWFQKISSRFCSRQSFALEQLKAKQRKDPRFCAFVQEAESRPRCRRLQLKDMIPTEMQRLTKYPLLLQSIGQNTEEPTEREKVELAAECCREILHHVNQAVRDMEDLLRLKDYQRRLDLSHLRQSSDPMLSEFKNLDITKKKLVHEGPLTWRVTKDKAVEVHVLLLDDLLLLLQRQDERLLLKSHSRTLTPTPDGKTMLRPVLRLTSAMTREVATDHKAFYVLFTWDQEAQIYELVAQTVSERKNWCALITETAGSLKVPAPASRPKPRPSPSSTREPLLSSSENGNGGRETSPADARTERILSDLLPFCRPGPEGQLAATALRKVLSLKQLLFPAEEDNGAGPPRDGDGVPGGGPLSPARTQEIQENLLSLEETMKQLEELEEEFCRLRPLLSQLGGNSVPQPGCT

SEQ ID NO: 6376 - DNA, 2663 bp, Homo sapien
acgaggcggaggcggcctgccggggtggttcggcttcccgttgccgcctcgggcgctgtacccagagctcgaagaggagcagcgcggccgcgcggacccggcaaggctgggccggactcggggctcccgagggacgccatgcggggaggcaggggcgcccctttctggctgtggccgctgcccaagctggcgctgctgcctctgttgtgggtgcttttccagcggacgcgtccccagggcagcgccgggccactgcagtgctacggagttggacccttgggcgacttgaactgctcgtgggagcctcttggggacctgggagccccctccgagttacacctccagagccaaaagtaccgttccaacaaaacccagactgtggcagtggcagccggacggagctgggtggccattcctcgggaacagctcaccatgtctgacaaactccttgtctggggcactaaggcaggccagcctctctggccccccgtcttcgtgaacctagaaacccaaatgaagccaaacgccccccggctgggccctgacgtggacttttccgaggatgaccccctggaggccactgtccattgggccccacctacatggccatctcataaagttctgatctgccagttccactaccgaagatgtcaggaggcggcctggaccctgctggaaccggagctgaagaccatacccctgacccctgttgagatccaagatttggagctagccactggctacaaagtgtatggccgctgccggatggagaaagaagaggatttgtggggcgagtggagccccattttgtccttccagacaccgccttctgctccaaaagatgtgtgggtatcagggaacctctgtgggacgcctggaggagaggaacctttgcttctatggaaggccccagggccctgtgtgcaggtgagctacaaagtctggttctgggttggaggtcgtgagctgagtccagaaggaattacctgctgctgctccctaattcccagtggggcggagtgggccagggtgtccgctgtcaacgccacaagctgggagcctctcaccaacctctctttggtctgcttggattcagcctctgccccccgtagcgtggcagtcagcagcatcgctgggagcacggagctactggtgacctggcaaccggggcctggggaaccactggagcatgtagtggactgggctcgagatggggaccccctggagaaactcaactgggtccggcttccccctgggaacctcagtgctctgttaccagggaatttcactgtcggggtcccctatcgaatcactgtgaccgcagtctctgcttcaggcttggcctctgcatcctccgtctgggggttcagggaggaattagcacccctagtggggccaacgctttggcgactccaagatgcccctccagggacccccgccatagcgtggggagaggtcccaaggcaccagcttcgaggccacctcacccactacaccttgtgtgcacagagtggaaccagcccctccgtctgcatgaatgtgagtggcaacacacagagtgtcaccctgcctgaccttccttggggtccctgtgagctgtgggtgacagcatctaccatcgctggacagggccctcctggtcccatcctccggcttcatctaccagataacaccctgaggtggaaagttctgccaggcatcctattcttgtggggcttgttcctgttggggtgtggcctgagcctggccacctctggaaggtgctaccacctaaggcacaaagtgctgccccgctgggtctgggagaaagttcctgatcctgccaacagcagttcaggccagccccacatggagcaagtacctgaggcccagccccttggggacttgcccatcctggaagtggaggagatggagcccccgccggttatggagtcctcccagcccgcccaggccaccgccccgcttgactctgggtatgagaagcacttcctgcccacacctgaggagctgggccttctggggccccccaggccacaggttctggcctgaaccacacgtctggctgggggctgccagccaggctagagggatgctcatgcaggttgcaccccagtcctggattagccctcttgatggatgaagacactgaggactcagagaggctgagtcacttacctgaggacacccagccaggcagagctgggattgaaggacccctatagagaagggcttggcccccatggggaagacacggatggaaggtggagcaaaggaaaatacatgaaattgagagtggcagctgcctgccaaaatctgttccgctgtaacagaactgaatttggaccccagcacagtggctcacgcctgtaatcccagcactttggcaggccaaggtggaaggatcacttagagctaggagtttgagaccagcctgggcaatatagcaagacccctcactacaaaaataaaacatcaaaaacaaaaacaattagctgggcatgatggcacacacctgtagtccgagccacttgggaggctgaggtgggaggatcggttgagcccaggagttcgaagctgcagggacctctgattgcaccactgcactccaggctgggtaacagaatgagaccttatctcaaaaataaacaaactaataaaaagca

SEQ ID NO: 6377 - protein, 636 aa, Homo sapien; identical to SEQ ID NO: 3983

SEQ ID NO: 6378 - DNA, 2570 bp, Homo sapien; identical to SEQ ID NO: 579

SEQ ID NO: 6379 - protein, 425 aa, Homo sapien; identical to SEQ ID NO: 580

SEQ ID NO: 6380 - DNA, 6814 bp, Homo sapien; identical to SEQ ID NO: 1001

SEQ ID NO: 6381 - protein, 562 aa, Homo sapien; identical to SEQ ID NO: 1002

SEQ ID NO: 6382 - DNA, 2865 bp, Homo sapien
ccagcggccgccgacgctaggaggccgcgctccgcccccgctaccatgaggccccggaaagccttcctgctcctgctgctcttggggctggtgcagctgctggccgtggcgggtgccgagggcccggacgaggattcttctaacagagaaaatgccattgaggatgaagaggaggaggaggaggaagatgatgatgaggaagaagacgacttggaagttaaggaagaaaatggagtcttggtcctaaatgatgcaaactttgataattttgtggctgacaaagacacagtgctgctggagttttatgctccatggtgtggacattgcaagcagtttgctccggaatatgaaaaaattgccaacatattaaaggataaagatcctcccattcctgttgccaagatcgatgcaacctcagcgtctgtgctggccagcaggtttgatgtgagtggctaccccaccatcaagatccttaagaaggggcaggctgtagactacgagggctccagaacccaggaagaaattgttgccaaggtcagagaagtctcccagcccgactggacgcctccaccagaagtcacgcttgtgttgaccaaagagaactttgatgaagttgtgaatgatgcagatatcattctggtggagttttatgccccatggtgtggacactgcaagaaacttgcccccgagtatgagaaggccgccaaggagctcagcaagcgttctcctccaattcccctggcaaaggtcgacgccaccgcagaaacagacctggccaagaggtttgatgtctctggctatcccaccctgaaaattttccgcaaaggaaggccttatgactacaacggcccacgagaaaaatatggaatcgttgattacatgatcgagcagtccgggcctccctccaaggagattctgaccctgaagcaggtccaggagttcctgaaggatggagacgatgtcatcatcatcggggtctttaagggggagagtgacccagcctaccagcaataccaggatgccgctaacaacctgagagaagattacaaatttcaccacactttcagcacagaaatagcaaagttcttgaaagtctcccaggggcagttggttgtaatgcagcctgagaaattccagtccaagtatgagccccggagccacatgatggacgtccagggctccacccaggactcggccatcaaggacttcgtgctgaagtacgccctgcccctggttggccaccgcaaggtgtcaaacgatgctaagcgctacaccaggcgccccctggtggtcgtctactacagtgtggacttcagctttgattacagagctgcaactcagttttggcggagcaaagtcctagaggtggccaaggacttccctgagtacacctttgccattgcggacgaagaggactatgctggggaggtgaaggacctggggctcagcgagagtggggaggatgtcaatgccgccatcctggacgagagtgggaagaagttcgccatggagccagaggagtttgactctgacaccctccgcgagtttgtcactgctttcaaaaaaggaaaactgaagccagtcatcaaatcccagccagtgcccaagaacaacaagggacccgtcaaggtcgtggtgggaaagacctttgactccattgtgatggaccccaagaaggacgtcctcatcgagttctacgcgccatggtgcgggcactgcaagcagctagagcccgtgtacaacagcctggccaagaagtacaagggccaaaagggcctggtcatcgccaagatggacgccactgccaacgacgtccccagcgaccgctataaggtggagggcttccccaccatctacttcgcccccagtggggacaaaaagaacccagttaaatttgagggtggagacagagatctggagcatttgagcaagtttatagaagaacatgccacaaaactgagcaggaccaaggaagagctttgaaggcctgaggtctgcggaaggtgggaggaggcagacgccctgcgtggcccatggtcggggcgtccaccggaggccggcaacaaacgacagtatctcggattcctttttttttttttttaattttttatactttgttgtttcacttcatgctctgaatactgaataaccatgaatgactgaatagtttagtccagatttttacagaggatacatctatttttatcattatttggggtttgaaaaatttttttttacaccttctaatttctttatttctcaaagcagataattcttctgtgtgaaaatgttttctttttttaatttaaggtttaaaattccttttccaaatcatgttgattttgctctttaaaaaaaaaaaaaaaaaaaaaaaaaaaaaaaaaaaaagaagggctgggaccaaccgggtgagatccacaagtctctggatgtggctgaaggcaaatacacaattgaagtactttctgttttgaagtgctttcccttttgaatctggtttgaaacatgcagcttctgtctctagcccaaggaaagaccaaaacatagggaaataaaagcatttatctttgtcttggaagtaattgttgaagttgtgcagttgatcagtgcacagttagctgcaatgtttatagaaattgattgttaaaccaaatttacactggcatgtgtggtgtagtttctaaaaggcacttcacatttgaaatttttcttaccttagaaagtttctagtgatctaaatgtctagttttgtattcttttgtgtgtgttcactgtttctcagtattaccacttgaataattctctgtacaggggggtttgtgctatacactgggatgtctaattgcagcaataaagcctttcttt

SEQ ID NO: 6383 - protein, 645 aa, Homo sapien; identical to SEQ ID NO: 3956

SEQ ID NO: 6384 - DNA, 1442 bp, Homo sapien
ccggggatccacgcgcgccgccacccctgcccgcccgacagcgccgccgcctgccccgccatgggtcgacagaaggagctggtgtcccgctgcggggagatgctccacatccgctaccggttgctccgacaggcgctggccgagtgcctggggaccctcatcctcgtgatgtttggctgtggctccgtggcccaggttgtgctcagccggggcacccacggtggtttcctcaccatcaacctggcctttggctttgctgtcactctgggcatcctcatcgctggccaggtctctggggcccacctgaaccctgccgtgacctttgccatgtgcttcctggctcgtgagccctggatcaagctgcccatctacaccctggcacagacgctgggagccttcttgggtgctggaatagtttttgggctgtattatgatgcaatctggcactttgccgacaaccagctttttgtttcgggccccaatggcacagccggcatctttgctacctacccctctggacacttggatatgatcaatggcttctttgaccagttcataggcacagcctcccttatcgtgtgtgtgctggccattgttgacccttacaacaaccccgtcccccgaggcctggaggccttcaccgtgggcctggtggtcctggtcattggcacctccatgggcttcaactccggctatgccgtcaaccctgcccgggactttggcccccgcctttttacagcccttgcgggctggggctctgcagtcttcacgaccggccagcattggtggtgggtgcccatcgtgtccccactcctgggctccattgcgggtgtcttcgtgtaccagctgatgatcggctgccacctggagcagcccccaccctccaacgaggaagagaatgtgaagctggcccatgtgaagcacaaggagcagatctgagtggcaagggccatctcccactccgctgccctggccttgagcatccactgactgtccaaggccactcccaagaagccccccttcacgatccaccctttcaggctaaggagctccctatctaccctcaccccacgaagacagccccttcaggatttccactggaccttgcccaaatagcaccttaggccactgcccctaagctggggtggaaccggaatttgggtcaatacatccttttgtctcccaagggaagagaatgggcagcaggtatgtgtgtgtgtgtgcatgtgtgcatgtgtgtgcatgtgtgtgcaggggtgtgtgtgtggggggggttcccagatattcagggcaagaccagtcggaaggatctgctattggggacccagagacagggaggcagcctgtccatctgtgcataaggagaggaaagttccagggtgtgtatgttttcaggggccttcacatggaggagctgcagatagatatgtgtttctccggaa

SEQ ID NO: 6385 - protein, 292 aa, Homo sapien; identical to SEQ ID NO: 68

SEQ ID NO: 6386 - DNA, 4225 bp, Homo sapien; identical to SEQ ID NO: 1860

SEQ ID NO: 6387 - protein, 840 aa, Homo sapien
MALASAAPGSIFCKQLLFSLLVLTLLCDACQKVYLRVPSHLQAETLVGKVNLEECLKSASLIRSSDPAFRILEDGSIYTTHDLILSSERKSFSIFLSDGQRREQQEIKVVLSARENKSPKKRHTKDTALKRSKRRWAPIPASLMENSLGPFPQHVQQIQSDAAQNYTIFYSISGPGVDKEPFNLFYIEKDTGDIFCTRSIDREKYEQFALYGYATTADGYAPEYPLPLIIKIEDDNDNAPYFEHRVTIFTVPENCRSGTSVGKVTATDLDEPDTLHTRLKYKILQQIPDHPKHFSIHPDTGVITTTTPFLDREKCDTYQLIMEVRDMGGQPFGLFNTGTITISLEDENDNPPSFTETSYVTEVEENRIDVEILRMKVQDQDLPNTPHSKAVYKILQGNENGNFIISTDPNTNEGVLCVVKPLNYEVNRQVILQVGVINEAQFSKAASSQTPTMCTTTVTVKIIDSDEGPECHPPVKVIQSQDGFPAGQELLGYKALDPEISSGEGLRYQKLGDEDNWFEINQHTGDLRTLKVLDRESKFVKNNQYNISVVAVDAVGRSCTGTLVVHLDDYNDHAPQIDKEVTICQNNEDFAVLKPVDPDGPENGPPFQFFLDNSASKNWNIEEKDGKTAILRQRQNLDYNYYSVPIQIKDRHGLVATHMLTVRVCDCSTPSECRMKDKSTRDVRPNVILGRWAILAMVLGSVLLLCILFTCFCVTAKRTVKKCFPEDIAQQNLIVSNTEGPGEEVTEANIRLPMQTSNICDTSMSVGTVGGQGIKTQQSFEMVKGGYTLDSNKGGGHQTLESVKGVGQGDTGRYAYTDWQSFTQPRLGEESIRGHTLIKN

SEQ ID NO: 6388 - DNA, 2162 bp, Homo sapien
gggctgcgctgtccagctgtggctatggccccagccccgagatgaggagggagagaactaggggcccgcaggcctgggaatttccgtcccccaccaagtccggatgctcactccaaagtctcagcaggcccctgagggagggagctgtcagccagggaaaaccgagaacaccatcaccatgacaaccagtcaccagcctcaggacagatacaaagctgtctggcttatcttcttcatgctgggtctgggaacgctgctcccgtggaattttttcatgacggccactcagtatttcacaaaccgcctggacatgtcccagaatgtgtccttggtcactgctgaactgagcaaggacgcccaggcgtcagccgcccctgcagcacccttgcctgagcggaactctctcagtgccatcttcaacaatgtcatgaccctatgtgccatgctgcccctgctgttattcacctacctcaactccttcctgcatcagaggatcccccagtccgtacggatcctgggcagcctggtggccatcctgctggtgtttctgatcactgccatcctggtgaaggtgcagctggatgctctgcccttctttgtcatcaccatgatcaagatcgtgctcattaattcatttggtgccatcctgcagggcagcctgtttggtctggctggccttctgcctgccagctacacggcccccatcatgagtggccagggcctagcaggcttctttgcctccgtggccatgatctgcgctattgccagtggctcggaactatcagaaagtgccttcggctactttatcacagcctgtgctgttatcattttgaccatcatctgttacctgggcctgccccgcctggaattctaccgctactaccagcagctcaagcttgaaggacccggggagcaggagaccaagttggacctcattagcaaaggagaggagccaagagcaggcaaagaggaatctggagtttcagtctccaactctcagcccaccaatgaaagccactctatcaaagccatcctgaaaaatatctcagtcctggctttctctgtctgcttcatcttcactatcaccattgggatgtttccagccgtgactgttgaggtcaagtccagcatcgcaggcagcagcacctgggaacgttacttcattcctgtgtcctgtttcttgactttcaatatctttgactggttgggccggagcctcacagctgtattcatgtggcctgggaaggacagccgctggctgccaagcctggtgctggcccggctggtgtttgtgccactgctgctgctgtgcaacattaagccccgccgctacctgactgtggtcttcgagcacgatgcctggttcatcttcttcatggctgcctttgccttctccaacggctacctcgccagcctctgcatgtgcttcgggcccaagaaagtgaagccagctgaggcagagaccgcaggagccatcatggccttcttcctgtgtctgggtctggcactgggggctgttttctccttcctgttccgggcaattgtgtgacaaaggatggacagaaggactgcctgcctccctccctgtctgcctcctgccccttccttctgccaggggtgatcctgagtggtctggcggttttttcttctaactgacttctgctttccacggcgtgtgctgggcccggatctccaggccctggggagggagcctctggacggacagtggggacattgtgggtttggggctcagagtcgagggacggggtgtagcctcggcatttgcttgagtttctccactcttggctctgactgatccctgcttgtgcaggccagtggaggctcttgggcttggagaacacgtgtgtctctgtgtatgtgtctgtgtgtctgcgtccgtgtctgtcagactgtctgcctgtcctggggtggctaggagctgggtctgaccgttgtatggtttgacctgatatactccattctcccctgcgcctcctcctctgtgttttttccatgtccccctcccaactccccatgcccagtttttacccatcatgcaccctgtacagttgccacgttactgccttttttaaaaatatatttgacagaaaccaggtgccttcagaggctctctgatttaaataaacctttcttgttttttt

SEQ ID NO: 6389 - protein, 456 aa, Homo sapien [sequence omitted]

SEQ ID NO: 6390 - DNA, 2129 bp, Homo sapien
cggaggagcggagcggtgcggaggctctgctcggatcgaggtctgcagcgcacgttcgggagcatgagtgctgcagtgactgcagggaagctggcacgggcaccggccgaccctgggaaagccggggtccccggagttgcagctcccggagctccggcggcggctccaccggcgaaagagatcccggaggtcctagtggacccacgcagccggcggcgctatgtgcggggccgctttttgggcaagggcggctttgccaagtgcttcgagatctcggacgtcgacaccaaggaggtgttcgcgggcaagattgtgcctaagtctctgctgctcaagccgcaccagagggagaagatgtccatggaaatatccattcaccgcagcctcgcccaccagcacgtcgtaggattccacggctttttcgaggacaacgacttcgtgttcgtggtgttggagctctgccgccggaggtctctcctggagctgcacaagaggaggaaagccctgactgagcctgaggcccgatactacctacggcaaattgtgcttggctgccagtacctgcaccgaaaccgagttattcatcgagacctcaagctgggcaaccttttcctgaatgaagatctggaggtcaaaataggggattttggactggcaaccaaagtcgaatatgacggggagaggaagaagaccctgtgtgggactcctaattacatagctcccgaggtgctgagcaagaaagggcacagtttcgaggtggatgtgtggtccattgggtgtatcatgtataccttgttagtgggcaaaccaccttttgagacttcttgcctaaaagagacctacctccggatcaagaagaatgaatacagtattcccaagcacatcaaccccgtggccgcctccctcatccagaagatgcttcagacagatcccactgcccgcccaaccattaacgagctgcttggtgacgagttctttacttctggctatatccctgcccgtctccccatcacctgcctgaccattccaccaaggttttcgattgctcccagcagcctggaccccagcaaccggaagcccctcacagtcctcaataaaggcttggagaaccccctgcctgagcgtccccgggaaaaagaagaaccagtggttcgagagacaggtgaggtggtcgactgccacctcagtgacatgctgcagcagctgcacagtgtcaatgcctccaagccctcggagcgtgggctggtcaggcaagaggaggctgaggatcctgcctgcatccccatcttctgggtcagcaagtgggtggactattcggacaagtacggccttgggtatcagctctgtgataacagcgtgggggtgctcttcaatgactcaacacgcctcatcctctacaatgatggtgacagcctgcagtacatagagcgtgacggcactgagtcctacctcaccgtgagttcccatcccaactccttgatgaagaagatcaccctccttaaatatttccgcaattacatgagcgagcacttgctgaaggcaggtggcaacatcacgccgcggcaaggtgatgagctcgcccggctgccctacctacggacctggttccgcacccgcagcgccatcatcctgcacctcagcaacggcagcgtgcagatcaacttcttccaggatcacaccaagctcatcttgtgcccactgatggcagccgtgacctacatcgacgagaagcgggacttccgcacataccgcctgagtctcctggaggagtacggctgctgcaaggagctggccagccggctccgttacgcccgcactatggtggacaagctgctgagctcacgctcggccagcaaccgtctcaaggcctcctaatagctgccctcccctccggactggtgccctcctcactcccacctgcatctggggcccatactggttggctcccgcggtgccatgtctgcagtgtgccccccagccccggtggctgggcagagctgcatcatccttgcaggtgggggttgctgtgtaagttatttttgtacatgttcgggtgtgggttctacagccttgtccccctccccctcaaccccaccatatgaattgtacagaatatttctattgaattc

SEQ ID NO: 6391 - protein, 603 aa, Homo sapien [sequence omitted]

SEQ ID NO: 6392 - DNA, 1813 bp, Homo sapien; identical to SEQ ID NO: 1490

SEQ ID NO: 6393 - protein, 446 aa, Homo sapien; identical to SEQ ID NO: 1491

SEQ ID NO: 6394 - DNA, 654 bp, Homo sapien
atgaagccgcccagttcaatacaaacaagtgagtttgactcatcagatgaagagcctattgaagatgaacagactccaattcatatatcatggctatctttgtcacgagtgaattgttctcagtttctcggtttatgtgctcttccaggttgtaaatttaaagatgttagaagaaatgtccaaaaagatacagaagaactaaagagctgtggtatacaagacatatttgttttctgcaccagaggggaactgtcaaaatatagagtcccaaaccttctggatctctaccagcaatgtggaattatcacccatcatcatccagtcgcagatggagggactcccgacatagccagctgctgtgaaataatggaagagcttacaacctgccttaccttaatacactgctatggaggacttgggagatcttgtcttgtagctgcttgtctcctactatacctgtctgacacaatatcaccagagcaagccatagacagcctgcgagacctaagaggatccggggcaatacagaccatcaagcaatacagttatcttcatgagtttcgggacatattagctgcacatctatcatcaagagattcacaatcaagatctgtatcaagataaaggaattcaaatagcatatatatgaccatg

SEQ ID NO: 6395 - protein, 207 aa, Homo sapien [sequence omitted]

SEQ ID NO: 6396 - DNA, 2763 bp, Homo sapien
ggatcccagtggcccggcgtgctcggctcccacaggcctgcagccagcatcgcaccgaaccttcggggggccgcggctggagcgctcggccggcgtgggagcgcaaggccgcagatgcaatcttcttaccgcgaagaagccaggggaataggtagccacatcttgtttgcagataagaaaggaagctaacgcagtatctgcaaagccaggagtctgactcagtacttttctcactcatgcatacaagcagctaaaaatgacacagcttatttaccatgcccctgacactgcactgagcactttatgagcttgaactctgttaatctcacgaccacctcatgagactctccagaaagagcaacagtaatggagtacatgagcactggaagtgacaataaagaagagattgatttattaattaaacatttaaatgtgtctgatgtaatagacattatggaaaatctttatgcaagtgaagagccagcagtttatgaacccagtctaatgaccatgtgtcaagacagtaatcaaaacgatgagcgttctaagtctctgctgcttagtggccaagaggtaccatggttgtcatcagtcagatatggaactgtggaggatttgcttgcttttgcaaaccatatatccaacactgcaaagcatttttatggacaacgaccacaggaatctggaattttattaaacatggtcatcactccccaaaatggacgttaccaaatagattccgatgttctcctgatcccctggaagctgacttacaggaatattggttctgattttattcctcggggcgcctttggaaaggtatacttggctcaagatataaagacgaagaaaagaatggcgtgtaaactgatcccagtagatcaatttaagccatctgatgtggaaattcaggcttgcttccggcacgagaacatcgcagagctgtatggcgcagtcctgtggggtgaaactgtccatctctttatggaagcaggcgagggagggtctgttctggagaaactggagagctgtggaccaatgagagaatttgaaattatttgggtgacaaagcatgttctcaagggacttgattttctacactcaaagaaagtgatccatcatgatattaaacctagcaacattgttttcatgtccacaaaagctgttttggtggattttggcctaagtgttcaaatgaccgaagatgtctattttcctaaggacctccgaggaacagagatttacatgagcccagaggtcatcctgtgcaggggccattcaaccaaagcagacatctacagcctgggggccacgctcatccacatgcagacgggcaccccaccctgggtgaagcgctaccctcgctcagcctatccctcctacctgtacataatccacaagcaagcacctccactggaagacattgcagatgactgcagtccagggatgagagagctgatagaagcttccctggagagaaaccccaatcaccgcccaagagccgcagacctactaaaacatgaggccctgaacccgcccagagaggatcagccacgctgtacgagtctggactctgccctcttggagcgcaagaggctgctgagtaggaaggagctggaacttcctgagaacattgctgattcttcgtgcacaggaagcaccgaggaatctgagatgctcaagaggcaacgctctctctacatcgacctcggcgctctggctggctacttcaatcttgttcggggaccaccaacgcttgaatatggctgaaggatgccatgtttgcctctaaattaagacagcattgatctcctggaggctggttctgctgcctctacacaggggcccgttacagtgaatggtgccattttcgaaggagcagtgtgacctcctgtgacccatgaatgtgcctccaagcggccctgtgtgtttgacatgtgaagctatttgatatgcaccaggtctcaaggttctcatttctcaggtgacgtgattctaaggcaggaatttgagagttcacagaaggatcgtgtctgctgactgtttcattcactgtgcactttgctcaaaattttaaaaataccaatcacaaggataatagagtagcctaaaattactattcttggttcttatttaagtatggaatattcattttactcagaatagcctgttttgtgtatattggtgtatattatataactctttgagcctttattggtaaattctggtatacattgaattcattataatttgggtgactagaacaacttgaagattgtagcaataagctggactagtgtcctaaaaatggctaactgatgaattagaagccatctgacagacggccactagtgacagtttcttttgtgttcctatggaaacattttatactgtacatgctatgctgaagacattcaaaacgtgatgttttgaatgtggataaaactgtgtaaaccacataattttgtacatccaaggatgaggtgtgacctttaagaaaaatgaaaacttttgtaaattattgatgattttgtaattcttatgactaaattttcttttaagcatttgtatattaaaatagcatactgtgtatgttttatatcaaatgccttcatgaatctttcatacatatatatatttgtaacatgtaaagtatgtgagtagtcttatgtaaagtatgtttttacattatgcaaataaaacccaatacttttgtccaatgtggttggtcaaatcaactgaataaattcagtattttgcctt

SEQ ID NO: 6397 - protein, 467 aa, Homo sapien [sequence omitted]

SEQ ID NO: 6398 - DNA, 1268 bp, Homo sapien
ctgtttctttttgtgtttgacagctaaagaaaagaagccctcttacaacaggggtctatgtgaaaatgcccccaacagagccagaatgtgaaaagcaatttcagccttattttattcccatcaattgagaaaccattatgaagaagagagtccatatttcaatttccaagagctgaggcaattctaacttttttgctatccagctatttttatttgtttgtgcatttgggggaattcatctctctttaatataaagttggatgcggaacccaaattacgtgtactacaatttaaagcaaaggagtagaaagacagagctgggatgtttctgtcacatcagctccactttcagtgaaagcatcacttgggattaatatggggatgcagcattatgatgtgggtcaaggaattaagttagggaatggcacagcccaaagaaggaaaaggcagggagcgagggagaagactatattgtacacaccttatatttacgtatgagacgtttatagccgaaatgatcttttcaagttaaattttatgccttttatttcttaaacaaatgtatgattacatcaaggcttcaaaaatactacatggctatgttttagccagtgatgctaaaggttgtattgcatatatacatatatatatatatatatatatatatatatatatatatatatatatatatatatattttaatttgatagtattgtgcatagagccacgtatgtttttgtgtatttgttaatggtgtgaatataaacactatatggcgagtgtctttccaccttgggtcccagggaagttttgtggaggagctcaggacactaatacaccaggtagaacacaaggtcatttgctaactagcttggaaactggatgaggtcatagcagtgcttgattgcgtggaattgtgctgagttggtgttgacatgtgctttggggcttttacaccagttcctttcaatggtttgcaaggaagccacagctggtggtatctgagttgacttgacagaacactgtcttgaagacaatggcttactccaggagacccacaggtatgaccttctaggaagctccagttcgatgggcccaattcttacaaacatgtggttaatgccatggacagaagaaggcagcaggtggcagaatggggtgcatgaaggtttctgaaattaacactgcttgtgtttttaactcaatattttccatgaaaatgcaacaacatgtataatatttttaattaaataaaaatctgtggtggt

SEQ ID NO: 6399 - DNA, 490 bp, Homo sapien
ctatagaagacctgggacagaggactgctgtctgccctctctggtcaccctgcctagctagaggatctgtgaccccagccatgaggaccctcgccatccttgctgccattctcctggtggccctgcaggcccaggctgagccactccaggcaagagctgatgaggttgctgcagccccggagcagattgcagcggacatcccagaagtggttgtttcccttgcatgggacgaaagcttggctccaaagcatccaggctcaaggaaaaacatggcctgctattgcagaataccagcgtgcattgcaggagaacgtcgctatggaacctgcatctaccagggaagactctgggcattctgctgctgagcttgcagaaaaagaaaaatgagctcaaaatttgctttgagagctacagggaattgctattactcctgtaccttctgctcaatttcctttcctcatcccaaataaatgccttggtacaagaaaag

SEQ ID NO: 6400 - protein, 94 aa, Homo sapien
MRTLAILAAILLVALQAQAEPLQARADEVAAAPEQIAADIPEVVVSLAWDESLAPKHPGSRKNMACYCRIPACIAGERRYGTCIYQGRLWAFCC

SEQ ID NO: 6401 - DNA, 3565 bp, Homo sapien
gcagccgggcggccgcagaagcgcccaggcccgcgcgccacccctctggcgccaccgtggttgagcccgtgacgtttacactcattcataaaacgcttgttataaaagcagtggctgcggcgcctcgtactccaaccgcatctgcagcgagcaactgagaagccaagactgagccggcggccgcggcgcagcgaacgagcagtgaccgtgctcctacccagctctgcttcacagcgcccacctgtctccgcccctcggcccctcgcccggctttgcctaaccgccacgatgatgttctcgggcttcaacgcagactacgaggcgtcatcctcccgctgcagcagcgcgtccccggccggggatagcctctcttactaccactcacccgcagactccttctccagcatgggctcgcctgtcaacgcgcaggtaaggctggcttcccgtcgccgcggggccgggggcttggggtcgcggaggaggagacaccgggcgggacgctccagtagatgagtagggggctcccttgtgcctggagggaggctgccgtggccggagcggtgccggctcgggggctcgggacttgctctgagcgcacgcacgcttgccatagtaagaattggttcccccttcgggaggcaggttcgttctgagcaacctctggtctgcactccaggacggatctctgacattagctggagcagacgtgtcccaagcacaaactcgctaactagagcctggcttcttcggggaggtggcagaaagcggcaatcccccctcccccggcagcctggagcacggaggagggatgagggaggagggtgcagcgggcgggtgtgtaaggcagtttcattgataaaaagcgagttcattctggagactccggagcggcgcctgcgtcagcgcagacgtcagggatatttataacaaaccccctttcaagcaagtgatgctgaagggataacgggaacgcagcggcaggatggaagagacaggcactgcgctgcggaatgcctgggaggaaaagggggagacctttcatccaggatgagggacatttaagatgaaatgtccgtggcaggatcgtttctcttcactgctgcatgcggcactgggaactcgccccacctgtgtccggaacctgctcgctcacgtcggctttccccttctgttttgttctaggacttctgcacggacctggccgtctccagtgccaacttcattcccacggtcactgccatctcgaccagtccggacctgcagtggctggtgcagcccgccctcgtctcctctgtggccccatcgcagaccagagcccctcaccctttcggagtccccgccccctccgctggggcttactccagggctggcgttgtgaagaccatgacaggaggccgagcgcagagcattggcaggaggggcaaggtggaacaggtgaggaactctagcgtactcttcctgggaatgtgggggctgggtgggaagcagccccggagatgcaggagcccagtacagaggatgaagccactgatggggctggctgcacatccgtaactgggagccctggctccaagcccattccatcccaactcagactctgagtctcaccctaagaagtactctcatagtttcttccctaagtttcttaccgcatgctttcagactgggctcttctttgttctcttgctgaggatcttattttaaatgcaagtcacacctattctgcaactgcaggtcagaaatggtttcacagtggggtgccaggaagcagggaagctgcaggagccagttctactggggtgggtgaatggaggtgatggcagacacttttactgaatgtcggtctttttttgtgattattctagttatctccagaagaagaagagaaaaggagaatccgaagggaaaggaataagatggctgcagccaaatgccgcaaccggaggagggagctgactgatacactccaagcggtaggtactctgtgggttgctcctttttaaaacttaagggaaagttggagattgagcataagggcccttgagtaagactgtgtcttatgctttcctttatccctctgtatacaggagacagaccaactagaagatgagaagtctgctttgcagaccgagattgccaacctgctgaaggagaaggaaaaactagagttcatcctggcagctcaccgacctgcctgcaagatccctgatgacctgggcttcccagaagagatgtctgtggcttcccttgatctgactgggggcctgccagaggttgccaccccggagtctgaggaggccttcaccctgcctctcctcaatgaccctgagcccaagccctcagtggaacctgtcaagagcatcagcagcatggagctgaagaccgagccctttgatgacttcctgttcccagcatcatccaggcccagtggctctgagacagcccgctccgtgccagacatggacctatctgggtccttctatgcagcagactgggagcctctgcacagtggctccctggggatggggcccatggccacagagctggagcccctgtgcactccggtggtcacctgtactcccagctgcactgcttacacgtcttccttcgtcttcacctaccccgaggctgactccttccccagctgtgcagctgcccaccgcaagggcagcagcagcaatgagccttcctctgactcgctcagctcacccacgctgctggccctgtgagggggcagggaaggggaggcagccggcacccacaagtgccactgcccgagctggtgcattacagagaggagaaacacatcttccctagagggttcctgtagacctagggaggaccttatctgtgcgtgaaacacaccaggctgtgggcctcaaggacttgaaagcatccatgtgtggactcaagtccttacctcttccggagatgtagcaaaacgcatggagtgtgtattgttcccagtgacacttcagagagctggtagttagtagcatgttgagccaggcctgggtctgtgtctcttttctctttctccttagtcttctcatagcattaactaatctattgggttcattattggaattaacctggtgctggatattttcaaattgtatctagtgcagctgattttaacaataactactgtgttcctggcaatagtgtgttctgattagaaatgaccaatattatactaagaaaagatacgactttattttctggtagatagaaataaatagctatatccatgtactgtagtttttcttcaacatcaatgttcattgtaatgttactgatcatgcattgttgaggtggtctgaatgttctgacattaacagttttccatgaaaacgttttattgtgtttttaatttatttattaagatggattctcagatatttatatttttattttatttttttctaccttgaggtcttttgacatgtggaaagtgaatttgaatgaaaaatttaagcattgtttgcttattgttccaagacattgtcaataaaagcatttaagttgaatgcgaccaaccttgtgctcttttcattctggaagt

SEQ ID NO: 6402 - DNA, 2387 bp, Homo sapien; identical to SEQ ID NO: 195

SEQ ID NO: 6403 - protein, 641 aa, Homo sapien; identical to SEQ ID NO: 196

SEQ ID NO: 6404 - DNA, 2977 bp, Homo sapien
gaggatgaaaaactgaagaagctggtggaacagaatggaacagatgactggaaagttattgccaattatctcccgaatcgaacagatgtgcagtgccagcaccgatggcagaaagtactaaaccctgagctcatcaagggtccttggaccaaagaagaagatcagagagtgatagagcttgtacagaaatacggtccgaaacgttggtctgttattgccaagcacttaaaggggagaattggaaaacaatgtagggagaggtggcataaccacttgaatccagaagttaagaaaacctcctggacagaagaggaagacagaattatttaccaggcacacaagagactggggaacagatgggcagaaatcgcaaagctactgcctggacgaactgataatgctatcaagaaccactggaattctacaatgcgtcggaaggtcgaacaggaaggttatctgcaggagtcttcaaaagccagccagccagcagtggccacaagcttccagaagaacagtcatttgatgggttttgctcaggctccgcctacagctcaactccctgccactggccagcccactgttaacaacgactattcctattaccacatttctgaagcacaaaatgtctccagtcatgttccataccctgtagcgttacatgtaaatatagtcaatgtccctcagccagctgccgcagccattcagagacactataatgatgaagaccctgagaaggaaaagcgaataaaggaattagaattgctcctaatgtcaaccgagaatgagctaaaaggacagcaggtgctaccaacacagaaccacacatgcagctaccccgggtggcacagcaccaccattgccgaccacaccagacctcatggagacagtgcacctgtttcctgtttgggagaacaccactccactccatctctgccagcggatcctggctccctacctgaagaaagcgcctcgccagcaaggtgcatgatcgtccaccagggcaccattctggataatgttaagaacctcttagaatttgcagaaacactccaatttatagattctttcttaaacacttccagtaaccatgaaaactcagacttggaaatgccttctttaacttccacccccctcattggtcacaaattgactgttacaacaccatttcatagagaccagactgtgaaaactcaaaaggaaaatactgtttttagaaccccagctatcaaaaggtcaatcttagaaagctctccaagaactcctacaccattcaaacatgcacttgcagctcaagaaattaaatacggtcccctgaagatgctacctcagacaccctctcatctagtagaagatctgcaggatgtgatcaaacaggaatctgatgaatctggaattgttgctgagtttcaagaaaatggaccacccttactgaagaaaatcaaacaagaggtggaatctccaactgataaatcaggaaacttcttctgctcacaccactgggaaggggacagtctgaatacccaactgttcacgcagacctcgcctgtggcagatgcaccgaatattcttacaagctccgttttaatggcaccagcatcagaagatgaagacaatgttctcaaagcatttacagtacctaaaaacaggtccctggcgagccccttgcagccttgtagcagtacctgggaacctgcatcctgtggaaagatggaggagcagatgacatcttccagtcaagctcgtaaatacgtgaatgcattctcagcccggacgctggtcatgtgagacatttccagaaaagcattatggttttcagaacacttcaagttgacttgggatatatcattcctcaacatgaaacttttcatgaatgggagaagaacctatttttgttgtggtacaacagttgagagcagcaccaagtgcatttagttgaatgaagtcttcttggatttcacccaactaaaaggatttttaaaaataaataacagtcttacctaaattattaggtaatgaattgtagccagttgttaatatcttaatgcagatttttttaaaaaaaaacataaaatgatttatctgtattttaaaggatccaacagatcagtattttttcctgtgatgggttttttgaaatttgacacattaaaaggtactccagtatttcacttttctcgatcactaaacatatgcatatatttttaaaaatcagtaaaagcattactctaagtgtagacttaataccatgtgacatttaatccagattgtaaatgctcatttatggttaatgacattgaaggtacatttattgtaccaaaccattttatgagttttctgttagcttgctttaaaaattattactgtaagaaatagttttataaaaaattatatttttattcagtaatttaattttgtaaatgccaaatgaaaaacgttttttgctgctatggtcttagcctgtagacatgctgctagtatcagaggggcagtagagcttggacagaaagaaaagaaacttggtgttaggtaattgactatgcactagtatttcagactttttaattttatatatatatacattttttttccttctgcaatacatttgaaaacttgtttgggagactctgcattttttattgtggtttttttgttattgttggtttatacaagcatgcgttgcacttcttttttgggagatgtgtgttgttgatgttctatgttttgttttgagtgtagcctgactgttttataatttgggagttctgcatttgatccgcatcccctgtggtttctaagtgtatggtctcagaactgttgcatggatcctgtgtttgcaactggggagacagaaactgtggttgatagccagtcactgccttaagaacatttgatgcaagatggccagcactgaacttttgagatatgacggtgtacttactgccttgtagcaaaataaagatgtgcccttattttacct

SEQ ID NO: 6405 - DNA, 630 bp, Homo sapien
atggtcgactacctagcaaataagcccaagggtcagaattctttggctttacacaaagtcatcatggtgggcagtggtggcgtgggcaagtcagctctgactctacagttcatgtacgatgagtttgtggaggactatgagcctaccaaagcagacagctatcggaagaaggtagtgctagatggggaggaagtccagatcgatatcttagatacagctgggcaggaggactacgctgcaattagagacaactacttccgaagtggggaggggttcctctgtgttttctctattacagaaatggaatcctttgcagctacagctgacttcagggagcagattttaagagtaaaagaagatgagaatgttccatttctactggttggtaacaaatcagatttagaagataaaagacaggtttctgtagaagaggcaaaaaacagagctgagcagtggaatgttaactacgtggaaacatctgctaaaacacgagctaatgttgacaaggtattttttgatttaatgagagaaattcgagcgagaaagatggaagacagcaaagaaaagaatggaaaaaagaagaggaaaagtttagccaagagaatcagagaaagatgctgcattttataa

SEQ ID NO: 6406 - protein, 209 aa, Homo sapien
MVDYLANKPKGQNSLALHKVIMVGSGGVGKSALTLQFMYDEFVEDYEPTKADSYRKKVVLDGEEVQIDILDTAGQEDYAAIRDNYFRSGEGFLCVFSITEMESFAATADFREQILRVKEDENVPFLLVGNKSDLEDKRQVSVEEAKNRAEQWNVNYVETSAKTRANVDKVFFDLMREIRARKMEDSKEKNGKKKRKSLAKRIRERCCIL

SEQ ID NO: 6407 - DNA, 1370 bp, Homo sapien
gaagagcagcaaagctgaagtagcagcaacagcaccagcagcaacagcaaaaaaacaaacatgagtgtgaagggcatggctatagccttggctgtgatattgtgtgctacagttgttcaaggcttccccatgttcaaaagaggacgctgtctttgcataggccctggggtaaaagcagtgaaagtggcagatattgagaaagcctccataatgtacccaagtaacaactgtgacaaaatagaagtgattattaccctgaaagaaaataaaggacaacgatgcctaaatcccaaatcgaagcaagcaaggcttataatcaaaaaagttgaaagaaagaatttttaaaaatatcaaaacatatgaagtcctggaaaagggcatctgaaaaacctagaacaagtttaactgtgactactgaaatgacaagaattctacagtaggaaactgagacttttctatggttttgtgactttcaacttttgtacagttatgtgaaggatgaaaggtgggtgaaaggaccaaaaacagaaatacagtcttcctgaatgaatgacaatcagaattccactgcccaaaggagtccaacaattaaatggatttctaggaaaagctaccttaagaaaggctggttaccatcggagtttacaaagtgctttcacgttcttacttgttgtattatacattcatgcatttctaggctagagaaccttctagatttgatgcttacaactattctgttgtgactatgagaacatttctgtctctagaagttatctgtctgtattgatctttatgctatattactatctgtggttacagtggagacattgacattattactggagtcaagcccttataagtcaaaagcatctatgtgtcgtaaagcattcctcaaacattttttcatgcaaatacacacttctttccccaaatatcatgtagcacatcaatatgtagggaaacattcttatgcatcatttggtttgttttataaccaattcattaaatgtaattcataaaatgtactatgaaaaaaattatatgctatgggatactggcaacagtgcacatatttcataaccaaattagcagcaccggtcttaatttgatgtttttcaacttttattcattgagatgttttgaagcaattaggatatgtgtgtttactgtactttttgttttgatccgtttgtataaatgatagcaatatcttggacacatttgaaatacaaaatgtttttgtctaccaaagaaaaatgttgaaaaataagcaaatgtatacctagcaatcacttttactttttgtaattctgtctcttagaaaaatacataatctaaccaaaaaaaaaaaaaaaaaaaaaaaaaaaaaa

SEQ ID NO: 6408 - protein, 94 aa, Homo sapien; identical to SEQ ID NO: 2401

SEQ ID NO: 6409 - DNA, 1977 bp, Homo sapien; identical to SEQ ID NO: 3918

SEQ ID NO: 6410 - protein, 390 aa, Homo sapien; identical to SEQ ID NO: 3919

SEQ ID NO: 6411 - DNA, 3646 bp, Homo sapien
gaattccatttacgcgttgctgaatctcctgtggacaaaccaccaataggccaggactgtcctgtggacagacggggtgagcctcttcttgtgtctggagattctgaaaagatttgatcaccaggagatttttcgggacattaccaaaccactcattttagtggctgcctccgggtgatgatggctgtgtgaacgactgccatggcccaccggaagcttgagagcgtggggagcggcatgttggaccatagggtgagaccaggtcctgtccctcacagccaggagcccgagagcgaggacatggagctgcccttggagggctatgtgcccgagggcctggagctggctgccctgcggccagagagccccgcgccagaggaacaggagtgccacaaccacagccccgatggggactccagctctgactacgtgaacaacacctctgaggaggaggactatgacgagggcctccctgaggaggaggagggcatcacctactacatccgctactgccctgaggacgacagctacctagagggcatggactgcaacggggaggagtacctggcccacagtgcacaccctgtggacactgatgagtgccaggaggccgtggaggagtggacggactcggcgggcccgcacccccacggccacgaggctgaaggcagccaggactacccagaccgccaactgcccattccggagatgagccctccgtccttgaggcccatgaccaggaagaagatggtcactatgtgccagcaaagagggctaccaggactactaccccgaggaggccaacgggaacaccggcgcctccccctaccgcctgaggctggggatggggacctggaggaccaggaggaggacattgaccagatcgtggcagagatcaagatgagtctgagcatgaccagcatcaccagcgccagtgaggccagccccgagcatgggcctgagccagggcctgaggactctgtagaggcctgcccacccatcaaggccagctgcagccccagcaggcacgaggcgaggcccaagtcgctgaacctccttcccgaggccaagcaccccggagacccccagagaggcttcaagcccaagaccaggaccccagaagagaggctgaagtggccccacgagcaggtttgcaatggtctggagcagccaaggaagcagcagcgctctgatctcaatggacctgttgacaataacaacattccagagacaaagaaggtggcatcatttccaagttttgtggctgttccagggccctgcgaaccagaagacctcatcgacgggatcatctttgctgccaattacctggggtccacccagctgctatcagaacggaacccttccaaaaacatcagaatgatgcaagcgcaggaggccgtcagccgggtcaagaggatgcaaaaggctgctaagatcaagaaaaaagcgaattctgagggggatgcccagacgctgacggaagtggacctcttcatttccacccagaggatcaaggttttaaatgcagacacgcaggaaaccatgatggaccacgccttgcgtaccatctcctacatcgccgacattgggaacattgtagtgctgatggccagacgccgcatgccccggtcagcctctcaggactgcatcgagaccacgcccggggcccaggaaggcaagaagcagtataagatgatctgccatgtgttcgagtcggaggatgcccagctcatcgcccagtctatcggccaggccttcagcgtggcctaccaggagttcctgcgagccaatggcatcaaccccgaagacttgagccagaaggaatacagcgacatcatcaacacccaggagatgtacaacgacgacctcatccacttctcaaactcggagaactgcaaggagctgcagctggagaagcacaagggcgagatcctgggcgtggtggtggtggagtcgggctggggctccatcctgcccacggtgatcctggccaacatgatgaatggctgcccggctgcccgctcggggaagctgagcatcggggaccagatcatgtccatcaatggcaccagcctggtggggctgcccctcgccacctgccaaggcatcatcaagggcctgaagaaccagacacaggtgaagctcaacattgtcagctgtcccccggtcaccacggtccttatcaagcggccagacctcaagtaccagctgggcttcagcgtgcagaatggaattatctgcagcctcatgagagggggcattgctgagcgagggggcgtccgtgtgggccaccgcatcatcgagatcaacgggcagagcgtggtggccacagcccacgagaagatagtccaagctctgtccaactcggtcggagagatccacatgaagaccatgcccgccgccatgttcaggctcctcacgggtcaggagaccccgctgtacatctaggccaccccagcctggccacgcagccaggacaccgggcagggccgcccggccagaggagctgggagccgggccgcagacttgaccccgacgccacagcccagccacggacgctggctccccaaagggtgtgccctcaccacccacttgatttttttcattttgccaaaaaggggtatgtctttatcaaaggagagtcacagaacaaatgtttgtttgtaaagcgttccaagtattttgccacgttctggactgtcttctccctgcacaagccagggtgtgtctcggtagctgtgcgtggtgtggagtgtgtgtctttcctccctgaagctgtgcggagcgaactggcgcctccgagggacgcggctcccggggcagggcagccgtcacccctgcctcccgcccccttggctgggacgtctggggtcctgtggggcccccacaatggtccaaacagctgcctctgccactgactgcagggacacgggcagcctggctcccaggacacgacttgtaatgaaagtttggggacatgtgattgattgattgattgattgtaaataaaggatgatggccacaacatgaaaactccatatttatttagatgctattattactgtttggacttttattttggcaggcttttttccagactctagggttttccaatgtgactaatgaccacacctgcctctcccgtcgtctcttctgggcaccctcccacccggctgcatacccggccaggctccacagagacaggagggcacaggtgtctgcccctctttaaatcgatctacacacatccacgcacatgcgaccccgaggaaacgaaacccactctagaaaacgcgaccttggccgcacctaaagcagccagccgtgagtgcagaccccttggccagcgtggcgcagtggccctgagcagtagtggcatgtgtgtagatcaagtcggatactagtccagctcggttcattagttagcgatccatgtaatctgacgtcatcttgtctcgaagtctctttttttgcccaggccttgaagaatacactgtgacttaagaagccttaccgcggcgtaactaaagctttaggatgactgtattcgaggagtgccgtgtgttgcatgcagctacccgtaggaagacttcgcgcatatcactaataaacctgaagtcgtgatgaaaaaaaaaaaaaaaaaaaa

SEQ ID NO: 6412 - protein, 748 aa, Homo sapien
MAHRKLESVGSGMLDHRVRPGPVPHSQEPESEDMELPLEGYVPEGLELAALRPESPAPEEQECHNHSPDGDSSSDYVNNTSEEEDYDEGLPEEEEGITYYIRYCPEDDSYLEGMDCNGEEYLAHSAHPVDTDECQEAVEEWTDSAGPHPHGHEAEGSQDYPDRQLPIPEMSPPSLRPMTRKKMVTMCQQRGLPGLLPRGGQREHRRLPLPPEAGDGDLEDQEEDIDQIVAEIKMSLSMTSITSASEASPEHGPEPGPEDSVEACPPIKASCSPSRHEARPKSLNLLPEAKHPGDPQRGFKPKTRTPEERLKWPHEQVCNGLEQPRKQQRSDLNGPVDNNNIPETKKVASFPSFVAVPGPCEPEDLIDGIIFAANYLGSTQLLSERNPSKNIRMMQAQEAVSRVKRMQKAAKIKKKANSEGDAQTLTEVDLFISTQRIKVLNADTQETMMDHALRTISYIADIGNIVVLMARRRMPRSASQDCIETTPGAQEGKKQYKMICHVFESEDAQLIAQSIGQAFSVAYQEFLRANGINPEDLSQKEYSDIINTQEMYNDDLIHFSNSENCKELQLEKHKGEILGVVVVESGWGSILPTVILANMMNGCPAARSGKLSIGDQIMSINGTSLVGLPLATCQGIIKGLKNQTQVKLNIVSCPPVTTVLIKRPDLKYQLGFSVQNGIICSLMRGGIAERGGVRVGHRIIEINGQSVVATAHEKIVQALSNSVGEIHMKTMPAAMFRLLTGQETPLYI

SEQ ID NO: 6413 - DNA, 597 bp, Homo sapien; identical to SEQ ID NO: 749

SEQ ID NO: 6414 - protein, 122 aa, Homo sapien; identical to SEQ ID NO: 750

SEQ ID NO: 6415 - DNA, 8058 bp, Homo sapien
tcaaagcaggtgtcttggtgtattgaccaccaaccgaggacacggtcttggtcagagaatgggaggaggcggggaccatgttcatttcatttatttttttcccctttttgtgagagaaagggccagttattctaaggcacggtcagaccaatttcctttgtgcctttgctgaggttctgagctatccaggtcagggagaacagtgaccttgtggctcctttttcgatttttaaaaagaacccactgctgctctggggagcacgtgctctgagaacaaaagcaacacttaactgcaatctgtgtagtctagaacggctattgctcttcctcccctatcatccgcagaaggcttggaagaacagatggagtctgcatttaagctgagtggctttgttagaccaaaggcgatcaaattccagagccccacgctttcccgcacaggtccctggtcaccggctcgggaacctgaggatgctggcaagaacgcacacagtgagggaagggccacgcccgcgacctgtgggctgagtggattagaaattacgatgatgtcacaatatgggtgacacgccggtgtcggtgtagggtgccgggggcagggggccctgcaggggcgtggagtggcattgtgctgtcacaggggctcgggcgtcttaggcacccatgtgggtggcgcactagaaggggcactgctctgtccgagtgctgcccttggggcgaggcgggcatgtggctctacaaggtggagtccaggcggccaaagtttggaaaggtagggaaggacccccccgccctccgcctcgtccgccctgcccttgttctcgagaatggggagctggttcggacctagtccggggtccactgccacgccctcttccacggcgagaccacccccctagtcccaggcccacacctggggatgctccccaggcgccctgcaacccccggcattgtcctcctgccctccgggacaggactacacttcccgaggtgcttcggggtcccggggggcggcgctccacgcgggttgtggggggcgggggcggcacgtgccgccgctctcggccaatgcggagccccgcgcggaggtcacgtgcctctgtttggcgcttttgtgcgcgcccgggtctgttggtgctcagagtgtggtcaggcggctcggactgagcaggtgggtgcggggctcggaggaggcggcggctggctgaggccagcaagagggacgcggtcggcgggaggggctgggccgtggcagcgaccccctgctgcagggcggcgggcggggctgcgggcctcggaggggttggtgggcgggggtcgctccgctttgtgtggctcgggcggacgtcgcctttgtccccgctctccgggggcgcggctgttcgtgggcagggggctgggcgatcaccgggcggtacgctccggggtgccgtccgcaaggagacaatagggggccgtgggcccatcgtttacctccctccctccctcccttccctgcgggccccgccgggttccccattgtctgaagggtcggggcggtgccagggaccagcggctttaggaccaaactggcgggtcagcccagggccgcgaccctccctgcgaccgtgcccactggcgaccgcagctggtgattgagggagggcggcgctcccgggccccacgagggttcttctgtcttcgcggccggacgcgcggacagcttgggtggcggcaggttgggcatggggacggcgggaggcggtggcgagctcaccgcgggaccacccgggggcctgttcccggggcctgccccacccgctgaactgtgaagggggtggtggcggcggcctggaggtgtttttggcgggagttggggggggcgtccgcgcagggggagtcaggcaggggcggagttacccggattggaccgttagccccgcccacccctccccttcccacgcgcgcgggctccggggtgttgagttcggggagattcgaaaaggcgcggggaggaagggggcggggccaggggccggagcgcaaggcgtgctctgattggccgggggcgaccggtcctcttttcctcgcccggaccaggccacgccatcctgggtccggtgctgcgtctaattctctgcttttcttaaatcttgtcgctgcctctgattttaattcctagcttttgggaacctgtcatcctacgtttttggtactagctggcgtctacaaaagtcataatgttaaaaagatcaacaagagatacagcatttttcatgacataacggcagcaaatataagtcaaaatctagaggttcataaacattttgcttgctgttgggcaaggaagcttaaacctgagggacaataggagttcaacattattggttactattagcttgggcgttttcttatccaccacgtcagacacagacaaagcaggggtgggtatttcatttgcacaatgagttgtaggcagtattaagatggctccgggggcactgttgagttgaatctggaatatcttcttacagtttcggtgaaatgttaaagagtttatgggggaaaaattcttcacccttgtgactttgtctgattttaaaaatccaagagttttgtgaccgagaaagctcagttaacttgattttctggaaccaatatcatattcaggtcatatttcccaatgtttatttagtagattttgataatttttttcgtggttaatttagacgtctttattccacgtatttttctgacgaatgtatgtagatgtgatgtgagatttttttgggttgatgacatatagaaaggcaaagaaagtgattgcatgtttttgaaaatcattttcaggactttccttatcccagttgattgtgcagaatacactgcctgtcgcttgtcttctattcaccatggcttcttctggtaggtaatctatttggaaaatctgaaattgtaatgggcttatgattttagattgagatggctcaggtcttcgcctttgatttggcacttatgttttggtcttaccaaaacctattttatgaataggagaagaatttaaaaatgattatcacttgaatgtgccgagagctcgtaattgtttattggacagtttggcttagtctgaagcaaattgtggagtttgcacaagtcttttgtttatgaaagcgattgtcagatactgatgtctcaaaacagtatttattaatccaaaaatgttgagctttgtttttctgggagatggtttttattttttttgagacagggtctcaccttgttgcccaggctggagtgcagtggcttaattatagctcattgcagccttgacttctggagctcaagtgggctcaagcgattctcccacctcagcctccatagcatctgggactatcgacatgggccaccacacccacctaatcaaaaaaaattttttttgtagagatgggctttccctttgttgcccaggctggtctcaaacttcagggctcaagggatcttcccatgttggcctcccacggtgctgggattataggcatgagccatggtacctggccttgggaaatggtatttagataataatatcttgcctgcaaatacatcttcccctagtgtcagtagactgataggaataaaaaggggaaaaaaaacacaactttcctcatcagccctagtttaatacattaaattgatttgggttttagaaaattatagtacagtttattagaacaggagaatcctggttttctgaattataaatataatcaattctagatatccaggtgaaagaactggagaagcgtgcctcaggccaggcttttgagctgattctcagccctcggtcaaaagaatctgttccagaattccccctttcccctccaaagaagaaggatctttccctggaggaaattcagaagaaattagaagctgcagaagaaagacgcaaggtaaacgaagcaattcacagaaagcaggatattaatttatgtaatgggcagatcaattttatttctataacaggaagaaaacagaattgtagctacactgtgattattacatatgccagtgactggaaggaaataccagtcctcatttattgaactcctgttacatgcccgctcctttgtttatatttttctcctttaatacatggtgttgcctcaaataatggaaattagaaacagtttcaggaatgttaagtcgtttttctgcagtcatacaactagtaagtgttggggtcagaattcaagccctggtctatcttaaaccaaagctcatgcttctctcatgcttcctctttgaaaagatttgttgccagatgattctttggcactttggttttgttttttgagagctgtacaataacattttaaattgctagtgtgattgtgttgctcagctggtatcatggtagcttttctcttatctaaacaattctattataaagtaactatctttaaaagctaatcagaagaatcaataaatattaatatgctagttgtagaaaatttgggaaatacagaaatttataaatggaaattaaaagtattcattatcccgcttccgagaagcaaccagtgttaacattttggtgtgtttctttccattcaatgttactcattaacaactgtacataacttttcatttaactccctttctcaacaaccctgataggattgattttaaagctggggcaagtgaggcacaaaaggtaaggtaataaccttccccagaccagcatagtgatttgtagtatacacacacaccccgcccgaagagcctcagtgcttacactaaggagtcgtcttctatcgaatagtgtgagttcatggagtaggaggaagcaatacaacccaaggttggacagtggaaagctttttagacatcaaccctggccctgtagtcattagcctgtgctttacatagtaactggctaaatataatgaaactcccatcatgactaggatttggcagaagagaatcaatagaaccagtgtcagatgctctgtggttatcctgcaagtcagtggttccaatgtgttttgagaacaagctgttctgttgaaggggtcataccaaggtatggtctggtaattaatgcagtttcctgagacaaaagctaataagccttttccttgaaacaaatttttctgtcttaaatagtaatctacagacttagtcttgaatttcctatcattgttttatcagttatggttaaaatttttacaatgagctagttttctttgggtagcttttgaagttaaatagtgaaattctttacaataaaagtgccactcgcaagtacatattcctcaagtcatccagataccattaagcagtaaatcttacaaggatttccttaaggactaattgggtaagatttctgaacagataagcacttttccaaagttaaatacaaatactagaaaaagaatatcattttcacagtattttatgatagggataattcaggtcctaattttggtgttatttaaagggaccttattttctgccccttttcaatccccttagtaaattatttttattgtaattttaacttatgctgaatacattttattttttgaggcagagtctctgtcacccagggtggagtgcagtggcacgatctcagttcactgcaacctccacctcccgggttcaagcaattctcctgcctcagcctcccaagtaacttagactacaggcacccgccaccacgcccggctaatttttgtatttttagtataggtaggatttcaccatgttggccaggctggtcttgaactcctgacctcaaatgatccacccaccttggcctcccaaagtgctgggattacaggcgtgagccaccacacccagcctgaatacattttagagtgcctagcctattaaacttttttttccagtcccatgaagctgaggtcttgaagcagctggctgagaaacgagagcacgagaaagaagtgcttcagaaggcaatagaagagaacaacaacttcagtaaaatggcagaagagaaactgacccacaaaatggaagctaataaagagaaccgagaggcacaaatggctgccaaactggaacgtttgcgagagaaggttggtttcttactttgtaaaagggttgagcttggagtttgatgcaccaatgagttggcttgaactaagtgctttgataaaaggtgtttggtgtctttttgtcatccattttggggcttaacatattaaatgaaaggtatattttaagatggaatattcagtaattcccagcataattgcacagtccttggaagtccagtaggcagcttgttaggttctacaagggacccaggagatttgatgatgatgtctcagaacttaaattgtgtggttcccacaggctgtaatatatgcactgaggttgtgttgggcctctttgaggtgggggctgggggtcgtgacttgacagggctttttttttttttttttttttttgactgatgacaccttacccttcctttacaggataagcacattgaagaagtgcggaagaacaaagaatccaaagaccctgctgacgagactgaagctgactaatttgttctgagaactgactttctccccatccccttcctaaatatccaaagactgtactggccagtgtcattttattttttccctcctgacaaatattttagaagctaatgtaggactgtataggtagatccagatccagactgtaagatgttgttttaggggctaaaggggagaaactgaaagtgttttactctttttctaaagtgttggtctttctaatgtagctatttttcttgttgcatcttttctacttcagtacacttggtgtactgggttaatggctagtactgtattggctctgtgaaaacatatttgtgaaaagagtatgtagtggcttcttttgaactgttagatgctgaatatctgttcacttttcaatcccaattctgtcccaatcttaccagatgctactggacttgaatggttaataaaactgcacagtgctgttggtggcagtgacttcttttgagttaggttaataaatcaagccatagagcccctcctggttgatacttgttccagatggggcctttggggctggtagaaatacccaacgcacaaatgaccgcacgttctctgccccgtttcttgccccagtgtggtttgcattgtctccttccacaatgactgctttgtttggatgcctcagcccaggtcagctgttactttctttcagatgtttatttgcaaacaaccattttttgttctgtgtcccttttaaaaggcagattaaaagcacaagcgtgtttctagagaacagttgagagagaatctcaagattctacttggtggtttgcttgctctacgttacaggtggggcatgtcctcatcctttcctgccataaaagctatgacacgagaatcagaatattaataaaactttatgtactgctgtagcaactcctgtgaaatgactaaagggaaccttaattatttctaaagtagcatttgactcgggtggttaaggttggcagatacgtcatcttgtatccagaggctgtaatagtccccattgtcagtgctttgcctctcaattcagggaacgcctttggcagctttcctgtgctatttgagaaatagcctaattatacatattttgtgcctctcagacatctgtataaaagctcttggaagccaagcacttatagcaaaagatgattgctaatactgcggtggggtccatgtgttcgtaacgcatgtgcctctgctgcttgggctgtatcttgagattggggttttaccaaacttattcatgagaacaataacagcctacctcaacttacctcctaagattgttaggattaaatgggtttgtggcaagagagcacacttagaacatagatatttagcattccgtataaatcacgattactgttttcaaccagaggctaatgagtgatctaagtttatactcttgagttggaaattatgcagtttttatattccttaaattgacttttaaatttacttaaatgatcaatcagaggaattctgaacaaagctt

SEQ ID NO: 6416 - DNA, 1661 bp, Homo sapien; identical to SEQ ID NO: 133

SEQ ID NO: 6417 - protein, 332 aa, Homo sapien; identical to SEQ ID NO: 134

SEQ ID NO: 6418 - DNA, 2764 bp, Homo sapien; identical to SEQ ID NO: 1043

SEQ ID NO: 6419 - protein, 510 aa, Homo sapien; identical to SEQ ID NO: 1044

SEQ ID NO: 6420 - DNA, 1149 bp, Homo sapien
  Unsure 1037: Unknown base
  Unsure 1074: Unknown base
  Unsure 1127: Unknown base
  Unsure 1132: Unknown base
  Unsure 1137: Unknown base
  Unsure 1146: Unknown base
  Unsure 1148: Unknown base
cgaggagcgagcgagctagctagaggcagccgcgcccgccgccgcccctgctctgtatgccgctctcccccggcgcggccgccgccgatcgcagcagcaggagccgccgccgccgcggttgatgtggttgggccggggctgaggaggccgccaagatgccgcagtccaagtcccggaagatcgcgatcctgggctaccggtctgtggggaaatcctcattgacgattcaatttgttgaaggccaatttgtggactcctacgatccaaccatagaaaacacttttacaaagttgatcacagtaaatggacaagaatatcatcttcaacttgtagacacagctgggcaagatgaatattctatctttcctcagacctactccatagatattaatggctatattcttgtgtattctgttacatcaatcaaaagttttgaagtgattaaagttatccatggcaaattattggatatggtggggaaagtacaaatacctattatgttggttgggaataagaaagacctgcatatggaaagggtgatcagttatgaagaagggaaagctttggcagaatcttggaatgcagcttttttggaatcttctgctaaagaaaatcagactgctgttgatgtttttagaaggataattttggaggcagaaaaaatggatggggcagcttcacaaggcaagtcttcatgctcggtgatgtgattctgctgtgaagcctgaggacactgggaatatattctacctgaagaagcaaactgcccgttctccttgaagatcaactatgcttcttttttcttctgttaacctgaaagataccatttgggtcagagctcccctcccttcagattatgttaactctgagtctgtccaaatgagttcacttccattttcaaattttaagcaatcatattttcaatttatatattgtatttcttaatattatgaccaagaattttatcggcattaatttttcagtgtagtttgttgtttaaaataatgtaatcatcaaaatgatgcatattgttacantactattaactaggcttcaatatatcagtgtttattnaaaatgtgttaatgtatacttgtaaataaaatagctgcaaacctgggaaattnccccnagaancgaggaagntna

SEQ ID NO: 6421 - protein, 184 aa, Homo sapien; identical to SEQ ID NO: 452

SEQ ID NO: 6422 - DNA, 2382 bp, Homo sapien
ggtctttgagcgctaacgtctttctgtctccccgcggtggtgatgacggtgaaaactgaggctgctaagggcaccctcacttactccaggatgaggggcatggtggcaattctcatcgctttcatgaagcagaggaggatgggtctgaacgactttattcagaagattgccaataactcctatgcatgcaaacaccctgaagttcagtccatcttgaagatctcccaacctcaggagcctgagcttatgaatgccaacccttctcctccaccaagtccttctcagcaaatcaaccttggcccgtcgtccaatcctcatgctaaaccatctgactttcacttcttgaaagtgatcggaaagggcagttttggaaaggttcttctagcaagacacaaggcagaagaagtgttctatgcagtcaaagttttacagaagaaagcaatcctgaaaaagaaagaggagaagcatattatgtcggagcggaatgttctgttgaagaatgtgaagcaccctttcctggtgggccttcacttctctttccagactgctgacaaattgtactttgtcctagactacattaatggtggagagttgttctaccatctccagagggaacgctgcttcctggaaccacgggctcgtttctatgctgctgaaatagccagtgccttgggctacctgcattcactgaacatcgtttatagagacttaaaaccagagaatattttgctagattcacagggacacattgtccttactgacttcggactctgcaaggagaacattgaacacaacagcacaacatccaccttctgtggcacgccggagtatctcgcacctgaggtgcttcataagcagccttatgacaggactgtggactggtggtgcctgggagctgtcttgtatgagatgctgtatggcctgccgcctttttatagccgaaacacagctgaaatgtacgacaacattctgaacaagcctctccagctgaaaccaaatattacaaattccgcaagacacctcctggagggcctcctgcagaaggacaggacaaagcggctcggggccaaggatgacttcatggagattaagagtcatgtcttcttctccttaattaactgggatgatctcattaataagaagattactcccccttttaacccaaatgtgagtgggcccaacgacctacggcactttgaccccgagtttaccgaagagcctgtccccaactccattggcaagtcccctgacagcgtcctcgtcacagccagcgtcaaggaagctgccgaggctttcctaggcttttcctatgcgcctcccacggactctttcctctgaaccctgttagggcttggttttaaaggattttatgtgtgtttccgaatgttttagttagccttttggtggagccgccagctgacaggacatcttacaagagaatttgcacatctctggaagcttagcaatcttattgcacactgttcgctggaagctttttgaagagcacattctcctcagtgagctcatgaggttttcatttttattcttccttccaacgtggtgctatctctgaaacgagcgttagagtgccgccttagacggaggcaggagtttcgttagaaagcggacgctgttctaaaaaaggtctcctgcagatctgtctgggctgtgatgacgaatattatgaaatgtgccttttctgaagagattgtgttagctccaaagcttttcctatcgcagtgtttcagttctttattttcccttgtggatatgctgtgtgaaccgtcgtgtgagtgtggtatgcctgatcacagatggattttgttataagcatcaatgtgacacttgcaggacactacaacgtgggacattgtttgtttcttccatatttggaagataaatttatgtgtagacttttttgtaagatacggttaataactaaaatttattgaaatggtcttgcaatgactcgtattcagatgcttaaagaaagcattgctgctacaaatatttctatttttagaaagggtttttatggaccaatgccccagttgtcagtcagagccgttggtgtttttcattgtttaaaatgtcacctgtaaaatgggcattatttatgttttttttttgcattcctgataattgtatgtattgtataaagaacgtctgtacattgggttataacactagtatatttaaacttacaggcttatttgtaatgtaaaccaccattttaatgtactgtaattaacatggttataatacgtacaatccttccctcatcccatcacacaaccttttttgtgtgtgataaactgattttggtttgcaataaaaccttgaaaaatatttaaaaaaaaaaaaaaaaaaaaaaaaaaaaaa

SEQ ID NO: 6423 - protein, 431 aa, Homo sapien
MTVKTEAAKGTLTYSRMRGMVAILIAFMKQRRMGLNDFIQKIANNSYACKHPEVQSILKISQPQEPELMNANPSPPPSPSQQINLGPSSNPHAKPSDFHFLKVIGKGSFGKVLLARHKAEEVFYAVKVLQKKAILKKKEEKHIMSERNVLLKNVKHPFLVGLHFSFQTADKLYFVLDYINGGELFYHLQRERCFLEPRARFYAAEIASALGYLHSLNIVYRDLKPENILLDSQGHIVLTDFGLCKENIEHNSTTSTFCGTPEYLAPEVLHKQPYDRTVDWWCLGAVLYEMLYGLPPFYSRNTAEMYDNILNKPLQLKPNITNSARHLLEGLLQKDRTKRLGAKDDFMEIKSHVFFSLINWDDLINKKITPPFNPNVSGPNDLRHFDPEFTEEPVPNSIGKSPDSVLVTASVKEAAEAFLGFSYAPPTDSFL

SEQ ID NO: 6424 - DNA, 2856 bp, Homo sapien
gtaaccgctactcccggacaccagaccaccgccttccgtacacaggggcccgcatcccaccctcccggacctaagagcctgggtcccctgtttccggaggtccgcttcccggcccccagattctggcatcccagccctcagtgtccaagacccaggcagcccgggtccccgcctcccggatccaggcgtccgggatctgcgccaccagaacctagcctcctgcagacctccgccatctgggggcactcaacctcctggagccaagggccccacgtcccacccagagaaactctcgtattcccagctcctagggccaaggaacccgggcgctccgaactcccagctttcggacatctggcacacggggcagagcagagaagctcagcgcccagcctggggaatttaaacactccagcttccaagagccaaggaacttcagtgctgtgaactcacaactctaaggagccctccaaagttccagtctccaggtgctgttactcaactcagtcctaggaacgtcgggtcctgggaaggagcccaagcgctcccagccagcttccaggcgctaagaaaccccggtgcttcccatcatggtggccgatcctcctcgagactccaaggggctcgcagcggcggagcccaccgccaacgggggcctggcgctggcctccatcgaggaccaaggcgcggcagcaggcggctactgcggttcccgggaccaggtgcgccgctgccttcgagccaacctgcttgtgctgctgacagtggtggccgtggtggccggcgtggcgctgggactgggggtgtcgggggccgggggtgcgctggcgttgggcccggagcgcttgagcgccttcgtcttcccgggcgagctgctgctgcgtctgctgcggatgatcatcttgccgctggtggtgtgcagcttgatcggcggcgccgccagcctggaccccggcgcgctcggccgtctgggcgcctgggcgctgctctttttcctggtcaccacgctgctggcgtcggcgctcggagtgggcttggcgctggctctgcagccgggcgccgcctccgccgccatcaacgcctccgtgggagccgcgggcagtgccgaaaatgcccccagcaaggaggtgctcgattcgttcctggatcttgcgagaaatatcttcccttccaacctggtgtcagcagcctttcgctcatactctaccacctatgaagagaggaatatcaccggaaccagggtgaaggtgcccgtggggcaggaggtggaggggatgaacatcctgggcttggtagtgtttgccatcgtctttggtgtggcgctgcggaagctggggcctgaaggggagctgcttatccgcttcttcaactccttcaatgaggccaccatggttctggtctcctggatcatgtggtacgcccctgtgggcatcatgttcctggtggctggcaagatcgtggagatggaggatgtgggtttactctttgcccgccttggcaagtacattctgtgctgcctgctgggtcacgccatccatgggctcctggtactgcccctcatctacttcctcttcacccgcaaaaacccctaccgcttcctgtggggcatcgtgacgccgctggccactgcctttgggacctcttccagttccgccacgctgccgctgatgatgaagtgcgtggaggagaataatggcgtggccaagcacatcagccgtttcatcctgcccatcggcgccaccgtcaacatggacggtgccgcgctcttccagtgcgtggccgcagtgttcattgcacagctcagccagcagtccttggacttcgtaaagatcatcaccatcctggtcacggccacagcgtccagcgtgggggcagcgggcatccctgctggaggtgtcctcactctggccatcatcctcgaagcagtcaacctcccggtcgaccatatctccttgatcctggctgtggactggctagtcgaccggtcctgtaccgtcctcaatgtagaaggtgacgctctgggggcaggactcctccaaaattatgtggaccgtacggagtcgagaagcacagagcctgagttgatacaagtgaagagtgagctgcccctggatccgctgccagtccccactgaggaaggaaaccccctcctcaaacactatcgggggcccgcaggggatgccacggtcgcctctgagaaggaatcagtcatgtaaaccccgggagggaccttccctgccctgctgggggtgctctttggacactggattatgaggaatggataaatggatgagctagggctctgggggtctgcctgcacactctggggagccaggggccccagcaccctccaggacaggagatctgggatgcctggctgctggagtacatgtgttcacaagggttactcctcaaaacccccagttctcactcatgtccccaactcaaggctagaaaacagcaagatggagaaataatgttctgctgcgtccccaccgtgacctgcctggcctcccctgtctcagggagcaggtcacaggtcaccatggggaattctagcccccactggggggatgttacaacaccatgctggttattttggcggctgtagttgtggggggatgtgtgtgtgcacgtgtgtgtgtgtgtgtgtgtgtgtgtgtgtgtgtgttctgtgacctcctgtccccatggtacgtcccaccctgtccccagatcccctattccctccacaataacagaaacactcccagggactctggggagaggctgaggacaaatacctgctgtcactccagaggacattttttttagcaataaaattgagtgtcaactatttaaaaaaaaaaaaaaaaa

SEQ ID NO: 6425 - protein, 541 aa, Homo sapien
MVADPPRDSKGLAAAEPTANGGLALASIEDQGAAAGGYCGSRDQVRRCLRANLLVLLTVVAVVAGVALGLGVSGAGGALALGPERLSAFVFPGELLLRLLRMIILPLVVCSLIGGAASLDPGALGRLGAWALLFFLVTTLLASALGVGLALALQPGAASAAINASVGAAGSAENAPSKEVLDSFLDLARNIFPSNLVSAAFRSYSTTYEERNITGTRVKVPVGQEVEGMNILGLVVFAIVFGVALRKLGPEGELLIRFFNSFNEATMVLVSWIMWYAPVGIMFLVAGKIVEMEDVGLLFARLGKYILCCLLGHAIHGLLVLPLIYFLFTRKNPYRFLWGIVTPLATAFGTSSSSATLPLMMKCVEENNGVAKHISRFILPIGATVNMDGAALFQCVAAVFIAQLSQQSLDFVKIITILVTATASSVGAAGIPAGGVLTLAIILEAVNLPVDHISLILAVDWLVDRSCTVLNVEGDALGAGLLQNYVDRTESRSTEPELIQVKSELPLDPLPVPTEEGNPLLKHYRGPAGDATVASEKESVM

SEQ ID NO: 6426 - DNA, 6266 bp, Homo sapien
cgttgtttggcgtgtttttttttttgttttttgtcactgcctgcctgggtcctgcccgaggtctccatcctcggtttccctgtccttgccccgggccctgggagtgctctggaaggctgcgcagtattggaggggacagaatgaccttccggccttgagtccctggggagcagatggaccctactggaagtcagttggattcagatttctctcagcaagatactccttgcctgataattgaagattctcagcctgaaagccaggttctagaggatgattctggttctcacttcagtatgctatctcgacaccttcctaatctccagacgcacaaagaaaatcctgtgttggatgttgtgtccaatcctgaacaaacagctggagaagaacgaggagacggtaatagtgggttcaatgaacatttgaaagaaaacaaggttgcagaccctgtggattcttctaacttggacacatgtggttccatcagtcaggtcattgagcagttacctcagccaaacaggacaagcagtgttctgggaatgtcagtggaatctgctcctgctgtggaggaagagaagggagaagagttggaacagaaggagaaagagaaggaagaagatacttcaggcaatactacacattcccttggtgctgaagatactgcctcatcacagttgggttttggggttctggaactctcccagagccaggatgttgaggaaaatactgtgccatatgaagtggacaaagagcagctacaatcagtaaccaccaactctggttataccaggctgtctgatgtggatgctaatactgcaattaagcatgaagaacagtccaacgaagatatccccatagcagaacagtccagcaaggacatccctgtgacagcacagcccagtaaggatgtacatgttgtaaaagagcaaaatccaccacctgcaaggtcagaggacatgccttttagccccaaagcatctgttgctgctatggaagcaaaagaacagttgtctgcacaagaacttatggaaagtggactgcagattcagaagtcaccagagcctgaggttttgtcaactcaggaagacttgtttgaccagagcaataaaacagtatcttctgatggttgctctactccttcaagggaggaaggtgggtgttctttggcttccactcctgccaccactctgcatctcctgcagctctctggtcagaggtcccttgttcaggacagtctttccacgaattcttcagatcttgttgctccttctcctgatgctttccgatctactccttttatcgttcctagcagtcccacagagcaagaagggagacaagataagccaatggacacgtcagtgttatctgaagaaggaggagagccttttcagaagaaacttcaaagtggtgaaccagtggagttagaaaacccccctctcctgcctgagtccactgtatcaccacaagcctcaacaccaatatctcagagcacaccagtcttccctcctgggtcacttcctatcccatcccagcctcagttttctcatgacatttttattccttccccaagtctggaagaacaatcaaatgatgggaagaaagatggagatatgcatagttcatctttgacagttgagtgttctaaaacttcagagattgaaccaaagaattcccctgaggatcttgggctatctttgacaggggattcttgcaagttgatgctttctacaagtgaatatagtcagtccccaaagatggagagcttgagttctcacagaattgatgaagatggagaaaacacacagattgaggatacggaacccatgtctccagttctcaattctaaatttgttcctgctgaaaatgatagtatcctgatgaatccagcacaggatggtgaagtacaactgagtcagaatgatgacaaaacaaagggagatgatacagacaccagggatgacattagtattttagccactggttgcaagggcagagaagaaacggtagcagaagatgtttgtattgatctcacttgtgattcggggagtcaggcagttccgtcaccagctactcgatctgaggcactttctagtgtgttagatcaggaggaagctatggaaattaaagaacaccatccagaggaggggtcttcagggtctgaggtggaagaaatccctgagacaccttgtgaaagtcaaggagaggaactcaaagaagaaaatatggagagtgttccgttgcacctttctctgactgaaactcagtcccaagggttgtgtcttcaaaaggaaatgccaaaaaaagaatgctcagaagctatggaagttgaaaccagtgtgattagtattgattcccctcaaaagttggcaatacttgaccaagaattggaacataaggaacaggaagcttgggaagaagctacttcagaggactccagtgttgtcattgtagatgtgaaagagccatctcccagagttgatgtttcttgtgaacctttggagggagtggagaagtgctcagattcccagtcatgggaggatattgctccagaaatagaaccatgtgctgagaatagattagacaccaaggaagaaaagagtgtagaatatgaaggagatctgaaatcagggactgcagaaacagaacctgtagagcaagattcttcacagccttccttacctttagtgagagcagatgatcctttaagacttgaccaggagttgcagcagccccaaactcaggagaaaacaagtaattcattaacagaagactcaaaaatggctaatgcaaagcagctaagctcagatgcagaggcccagaagctggggaagccctctgcccatgcctcacaaagcttctgtgaaagttctagtgaaaccccatttcatttcactttgcctaaagaaggtgatatcatcccaccattgactggtgcaaccccacctcttattgggcacctaaaattggagcccaagagacacagtactcctattggtattagcaactatccagaaagcaccatagcaaccagtgatgtcatgtctgaaagcatggtggagacccatgatcccatacttgggagtggaaaaggggattctggggctgccccagacgtggatgataaattatgtctaagaatgaaactggttagtcctgagactgaggcgagtgaagagtctttgcagttcaacctggaaaagcctgcaactggtgaaagaaaaaatggatctactgctgttgctgagtctgttgccagtccccagaagaccatgtctgtgttgagctgtatctgtgaagccaggcaagagaatgaggctcgaagtgaggatccccccaccacacccatcagggggaacttgctccactttccaagttctcaaggagaagaggagaaagaaaaattggagggtgaccatacaatcaggcagagtcaacagcctatgaagcccattagtcctgtcaaggaccctgtttctcctgcttcccagaagatggtcatacaagggccatccagtcctcaaggagaggcaatggtgacagatgtgctagaagaccagaaagaaggacggagtactaataaggaaaatcctagtaaggccttgattgaaaggcccagccaaaataacataggaatccaaaccatggagtgttccttgagggtcccagaaactgtttcagcagcaacccagactataaagaatgtgtgtgagcaggggaccagtacagtggaccagaactttggaaagcaagatgccacagttcagactgagagggggagtggtgagaaaccagtcagtgctcctggggatgatacagagtcgctccatagccagggagaagaagagtttgatatgcctcagcctccacatggccatgtcttacatcgtcacatgagaacaatccgggaagtacgcacacttgtcactcgtgtcattacagatgtgtattatgtggatggaacagaagtagaaagaaaagtaactgaggagactgaagagccaattgtagagtgtcaggagtgtgaaactgaagtttccccttcacagactgggggctcctcaggtgacctgggggatatcagctccttctcctccaaggcatccagcttacaccgcacatcaagtgggacaagtctctcagctatgcacagcagtggaagctcagggaaaggagccggaccactcagagggaaaaccagcgggacagaacccgcagattttgccttacccagctcccgaggaggcccaggaaaactgagtcctagaaaaggggtcagtcagacagggacgccagtgtgtgaggaggatggtgatgcaggccttggcatcagacagggagggaaggctccagtcacgcctcgtgggcgtgggcgaaggggccgcccaccttctcggaccactggaaccagagaaacagctgtgcctggccccttgggcatagaggacatttcacctaacttgtcaccagatgataaatccttcagccgtgtcgtgccccgagtgccagactccaccagacgaacagatgtgggtgctggtgctttgcgtcgtagtgactctccagaaattcctttccaggctgctgctggcccttctgatggcttagatgcctcctctccaggaaatagctttgtagggctccgtgttgtagccaagtggtcatccaatggctacttttactctgggaaaatcacacgagatgtcggagctgggaagtataaattgctctttgatgatgggtacgaatgtgatgtgttgggcaaagacattctgttatgtgaccccatcccgctggacactgaagtgacggccctctcggaggatgagtatttcagtgcaggagtggtgaaaggacataggaaggagtctggggaactgtactacagcattgaaaaagaaggccaaagaaagtggtataagcgaatggctgtcatcctgtccttggagcaaggaaacagactgagagagcagtatgggcttggcccctatgaagcagtaacacctcttacaaaggcagcagatatcagcttagacaatttggtggaagggaagcggaaacggcgcagtaacgtcagctccccagccacccctactgcctccagtagcagcagcacaacccctacccgaaagatcacagaaagtcctcgtgcctccatgggagttctctcaggcaaaagaaaacttatcacttctgaagaggaacggtcccctgccaagcgaggtcgcaagtctgccacagtaaaacctggtgcagtaggggcaggagagtttgtgagcccctgtgagagtggagacaacaccggtgaaccctctgccctggaagagcagagagggcctttgcctctcaacaagaccttgtttctgggctacgcatttctccttaccatggccacaaccagtgacaagttggccagccgctccaaactgccagatggtcctacaggaagcagtgaagaagaggaggaatttttggaaattcctcctttcaacaagcagtatacagaatcccagcttcgagcaggagctggctatatccttgaagatttcaatgaagcccagtgtaacacagcttaccagtgtcttctaattgcggatcagcattgtcgaacccggaagtacttcctgtgccttgccagtgggattccttgtgtgtctcatgtctgggtccatgatagttgccatgccaaccagctccagaactaccgtaattatctgttgccagctgggtacagccttgaggagcaaagaattctggactggcaaccccgtgaaaatcctttccagaatctgaaggtactcttggtatcagaccaacagcagaacttcctggagctctggtctgagatcctcatgactggtggtgcagcctctgtgaagcagcaccattcaagtgcccataacaaagatattgctttaggggtatttgatgtggtggtgacggacccctcatgcccagcctcggtgctgaagtgtgctgaagcattgcagctgcctgtggtgtcacaagagtgggtgatccagtgcctcattgttggggagagaattggattcaagcagcatccaaaatataaacacgattatgtttctcactaaagatacttggtcttactggttttattccctgctatcgtggagattgtgttttaaccaggttttaaatgtgtcttgtgtgtaactggattccttgcatggatcttgtatatagttttatttgctgaacttttatgataaaataaatgttgaatctctttggttgtagtaactggg

SEQ ID NO: 6427 - protein, 1972 aa, Homo sapien
MDPTGSQLDSDFSQQDTPCLIIEDSQPESQVLEDDSGSHFSMLSRHLPNLQTHKENPVLDVVSNPEQTAGEERGDGNSGFNEHLKENKVADPVDSSNLDTCGSISQVIEQLPQPNRTSSVLGMSVESAPAVEEEKGEELEQKEKEKEEDTSGNTTHSLGAEDTASSQLGFGVLELSQSQDVEENTVPYEVDKEQLQSVTTNSGYTRLSDVDANTAIKHEEQSNEDIPIAEQSSKDIPVTAQPSKDVHVVKEQNPPPARSEDMPFSPKASVAAMEAKEQLSAQELMESGLQIQKSPEPEVLSTQEDLFDQSNKTVSSDGCSTPSREEGGCSLASTPATTLHLLQLSGQRSLVQDSLSTNSSDLVAPSPDAFRSTPFIVPSSPTEQEGRQDKPMDTSVLSEEGGEPFQKKLQSGEPVELENPPLLPESTVSPQASTPISQSTPVFPPGSLPIPSQPQFSHDIFIPSPSLEEQSNDGKKDGDMHSSSLTVECSKTSEIEPKNSPEDLGLSLTGDSCKLMLSTSEYSQSPKMESLSSHRIDEDGENTQIEDTEPMSPVLNSKFVPAENDSILMNPAQDGEVQLSQNDDKTKGDDTDTRDDISILATGCKGREETVAEDVCIDLTCDSGSQAVPSPATRSEALSSVLDQEEAMEIKEHHPEEGSSGSEVEEIPETPCESQGEELKEENMESVPLHLSLTETQSQGLCLQKEMPKKECSEAMEVETSVISIDSPQKLAILDQELEHKEQEAWEEATSEDSSVVIVDVKEPSPRVDVSCEPLEGVEKCSDSQSWEDIAPEIEPCAENRLDTKEEKSVEYEGDLKSGTAETEPVEQDSSQPSLPLVRADDPLRLDQELQQPQTQEKTSNSLTEDSKMANAKQLSSDAEAQKLGKPSAHASQSFCESSSETPFHFTLPKEGDIIPPLTGATPPLIGHLKLEPKRHSTPIGISNYPESTIATSDVMSESMVETHDPILGSGKGDSGAAPDVDDKLCLRMKLVSPETEASEESLQFNLEKPATGERKNGSTAVAESVASPQKTMSVLSCICEARQENEARSEDPPTTPIRGNLLHFPSSQGEEEKEKLEGDHTIRQSQQPMKPISPVKDPVSPASQKMVIQGPSSPQGEAMVTDVLEDQKEGRSTNKENPSKALIERPSQNNIGIQTMECSLRVPETVSAATQTIKNVCEQGTSTVDQNFGKQDATVQTERGSGEKPVSAPGDDTESLHSQGEEEFDMPQPPHGHVLHRHMRTIREVRTLVTRVITDVYYVDGTEVERKVTEETEEPIVECQECETEVSPSQTGGSSGDLGDISSFSSKASSLHRTSSGTSLSAMHSSGSSGKGAGPLRGKTSGTEPADFALPSSRGGPGKLSPRKGVSQTGTPVCEEDGDAGLGIRQGGKAPVTPRGRGRRGRPPSRTTGTRETAVPGPLGIEDISPNLSPDDKSFSRVVPRVPDSTRRTDVGAGALRRSDSPEIPFQAAAGPSDGLDASSPGNSFVGLRVVAKWSSNGYFYSGKITRDVGAGKYKLLFDDGYECDVLGKDILLCDPIPLDTEVTALSEDEYFSAGVVKGHRKESGELYYSIEKEGQRKWYKRMAVILSLEQGNRLREQYGLGPYEAVTPLTKAADISLDNLVEGKRKRRSNVSSPATPTASSSSSTTPTRKITESPRASMGVLSGKRKLITSEEERSPAKRGRKSATVKPGAVGAGEFVSPCESGDNTGEPSALEEQRGPLPLNKTLFLGYAFLLTMATTSDKLASRSKLPDGPTGSSEEEEEFLEIPPFNKQYTESQLRAGAGYILEDFNEAQCNTAYQCLLIADQHCRTRKYFLCLASGIPCVSHVWVHDSCHANQLQNYRNYLLPAGYSLEEQRILDWQPRENPFQNLKVLLVSDQQQNFLELWSEILMTGGAASVKQHHSSAHNKDIALGVFDVVVTDPSCPASVLKCAEALQLPVVSQEWVIQCLIVGERIGFKQHPKYKHDYVSH

SEQ ID NO: 6428 - DNA, 1614 bp, Homo sapien
ggtagttggttgtgggcactgggttagaggtatcacgtgggggcactttcgtcttagcttttggacaagacgcaggcgcaacccacggctgctgcggggatccttgtggcccttccggtcggtggaaccaatccgtgcacagagaagcggggcgaactgaggcgagtgaagtggactctgagggctaccgctaccgccactgctgcggcaggggcgtggagggcagagggccgcggaggccgcagttgcaaacatggctcagagcagagacggcggaaacccgttcgccgagcccagcgagcttgacaacccctttcaggacccagctgtgatccagcaccgacccagccggcagtatgccacgcttgacgtctacaacccttttgagacccgggagccaccaccagcctatgagcctccagcccctgccccattgcctccaccctcagctccctccttgcagccctcgagaaagctcagccccacagaacctaagaactatggctcatacagcactcaggcctcagctgcagcagccacagctgagctgctgaagaaacaggaggagctcaaccggaaggcagaggagttggaccgaagggagcgagagctgcagcatgctgccctggggggcacagctactcgacagaacaattggccccctctaccttctttttgtccagttcagccctgctttttccaggacatctccatggagatcccccaagaatttcagaagactgtatccaccatgtactacctctggatgtgcagcacgctggctcttctcctgaacttcctcgcctgcctggccagcttctgtgtggaaaccaacaatggcgcaggctttgggctttctatcctctgggtcctccttttcactccctgctcctttgtctgctggtaccgccccatgtataaggctttccggagtgacagttcattcaatttcttcgttttcttcttcattttcttcgtccaggatgtgctctttgtcctccaggccattggtatcccaggttggggattcagtggctggatctctgctctggtggtgccgaagggcaacacagcagtatccgtgctcatgctgctggtcgccctgctcttcactggcattgctgtgctaggaattgtcatgctgaaacggatccactccttataccgccgcacaggtgccagctttcagaaggcccagcaagaatttgctgctggtgtcttctccaaccctgcggtgcgaaccgcagctgccaatgcagccgctggggctgctgaaaatgccttccgggccccgtgacccctgactgggatgccctggccctgctacttgagggagctgacttagctcccgtccctaaggtctctgggacttggagagacatcactaactgatggctcctccgtagtgctcccaatcctatggccatgactgctgaacctgacaggcgtgtggggagttcactgtgacctagtccccccatcaggccacactgctgccacctctcacacgccccaacccagcttccctctgctgtgccacggctgttgcttcggttatttaaataaaaagaaagtggaactggaactgacaaaaaaaaaaaaaaaaaaaaaaaa

SEQ ID NO: 6429 - protein, 347 aa, Homo sapien
MAQSRDGGNPFAEPSELDNPFQDPAVIQHRPSRQYATLDVYNPFETREPPPAYEPPAPAPLPPPSAPSLQPSRKLSPTEPKNYGSYSTQASAAAATAELLKKQEELNRKAEELDRRERELQHAALGGTATRQNNWPPLPSFCPVQPCFFQDISMEIPQEFQKTVSTMYYLWMCSTLALLLNFLACLASFCVETNNGAGFGLSILWVLLFTPCSFVCWYRPMYKAFRSDSSFNFFVFFFIFFVQDVLFVLQAIGIPGWGFSGWISALVVPKGNTAVSVLMLLVALLFTGIAVLGIVMLKRIHSLYRRTGASFQKAQQEFAAGVFSNPAVRTAAANAAAGAAENAFRAP

SEQ ID NO: 6430 - DNA, 1433 bp, Homo sapien
cgcctttgcccgaagcccggggacgaaccgacggaccgaccgcctggcgcacggacgcgggcgctcgctttgtgttcggggctagcgtcggcgaggcttgagcttgcagcgcgcggcttccctgctttctcgcggccaccccggctccggcggcctcggcgcgcgaggggctggaggtgcgggagccgctctccgccggtcggtccccgcgcggctgagcccaggccgccagcgccgcggccccgtgcggtgtccctgagctcctgctccccgccgggctgctccgagcaacggtgcttcggagctccaaactcgggctgccggggcaagtgtcttcatgaacccagaggatgtccgggaagcactacaagggtcctgaagtcagttgttgcatcaaatacttcatatttggcttcaatgtcatattttggtttttgggaataacatttcttggaattggactgtgggcatggaatgaaaaaggagttctgtccaacatctcttccatcaccgatctcggcggctttgacccagtttggctcttccttgtggtgggaggagtgatgttcattttgggatttgcagggtgcattggagcgctacgggaaaacactttccttctcaagtttttttctgtgttcctgggaattattttcttcctggagctcactgccggagttctagcatttgttttcaaagactggatcaaagaccagctgtatttctttataaacaacaacatcagagcatatcgggatgacattgatttgcaaaacctcatagacttcacccaggaatattggcagtgctgtggggcttttggagctgatgattggaacctaaatatttacttcaattgcacagattccaatgcaagtcgagagcgatgtggcgttccattctcctgctgcactaaagatcccgcagaagatgtcatcaacactcagtgtggctatgatgccaggcaaaaaccagaagttgaccagcagattgtaatctacacgaaaggctgtgtgccccagtttgagaagtggttgcaggacaatttaaccatcgttgctggtattttcataggcattgcattgctgcagatatttgggatatgcctggcccagaatttggttagcgatatcgaagctgtcagggcgagctggtagaccccctgcaaccgctgctgcaagacactggacagacccagctttcgggaccctcccgcgtgccgaactgatcttcgagctgcatggacctaatcacagatgcagcctgcagtctcgcctaatggagctgccattaggggagtgtaaaactgggaaatgctgctcactgacagaattaaaaaaaaaaataaccagtatgaaagtcgttgcgccgtgaatctctactgtagccatgaatttatggacagttagatgcttaccaaaaaagaaaaaaaa

SEQ ID NO: 6431 - protein, 268 aa, Homo sapien; identical to SEQ ID NO: 4578

SEQ ID NO: 6432 - DNA, 1591 bp, Homo sapien; identical to SEQ ID NO: 475

SEQ ID NO: 6433 - protein, 207 aa, Homo sapien; identical to SEQ ID NO: 476

SEQ ID NO: 6434 - DNA, 4449 bp, Homo sapien
ggaagctgtgagagcgcggttgcggggtcgcattgtggctacggctttgcgtccccggcgggcagcccaggctggtccccgcctccgctctccccaccggcggggaaagcagctggtgtgggaggaaaggctccatcccccgccccctctctcccgctgttggctggcaggatcttttggcagtcctgtggcctcgctccccgcccggatcctcctgaccctgagattcgcgggtctcacgtcccgtgcacgccttgcttcggcctcagttaagcctttgtggactccaggtccctggtgagattagaaacgtttgcaaacatgtcccggatcgaaaagatgagcattctgggcgtgcggagttttggaatagaggacaaagataagcaaattatcactttcttcagcccccttacaattttggttggacccaatggggcgggaaagacgaccatcattgaatgtctaaaatatatttgtactggagatttccctcctggaaccaaaggaaatacatttgtacacgatcccaaggttgctcaagaaacagatgtgagagcccagattcgtctgcaatttcgtgatgtcaatggagaacttatagctgtgcaaagatctatggtgtgtactcagaaaagcaaaaagacagaatttaaaactctggaaggagtcattactagaacaaagcatggtgaaaaggtcagtctgagctctaagtgtgcagaaattgaccgagaaatgatcagttctcttggggtttccaaggctgtgctaaataatgtcattttctgtcatcaagaagattctaattggcctttaagtgaaggaaaggctttgaagcaaaagtttgatgagattttttcagcaacaagatacattaaagccttagaaacacttcggcaggtacgtcagacacaaggtcagaaagtaaaagaatatcaaatggaactaaaatatctgaagcaatataaggaaaaagcttgtgagattcgtgatcagattacaagtaaggaagcccagttaacatcttcaaaggaaattgtcaaatcctatgagaatgaacttgatccattgaagaatcgtctaaaagaaattgaacataatctctctaaaataatgaaacttgacaatgaaattaaagccttggatagccgaaagaagcaaatggagaaagataatagtgaactggaagagaaaatggaaaaggtttttcaagggactgatgagcaactaaatgacttatatcacaatcaccagagaacagtaagggagaaagaaaggaaattggtagactgtcatcgtgaactggaaaaactaaataaagaatctaggcttctcaatcaggaaaaatcagaactgcttgttgaacagggtcgtctacagctgcaagcagatcgccatcaagaacatatccgagctagagattcattaattcagtctttggcaacacagctagaattggatggctttgagcgtggaccattcagtgaaagacagattaaaaattttcacaaacttgtgagagagagacaagaaggggaagcaaaaactgccaaccaactgatgaatgactttgcagaaaaagagactctgaaacaaaaacagatagatgagataagagataagaaaactggactgggaagaataattgagttaaaatcagaaatcctaagtaagaagcagaatgagctgaaaaatgtgaagtatgaattacagcagttggaaggatcttcagacaggattcttgaactggaccaggagctcataaaagctgaacgtgagttaagcaaggctgagaaaaacagcaatgtagaaaccttaaaaatggaagtaataagtctccaaaatgaaaaagcagacttagacaggaccctgcgtaaacttgaccaggagatggagcagttaaaccatcatacaacaacacgtacccaaatggagatgctgaccaaagacaaagctgacaaagatgaacaaatcagaaaaataaaatctaggcacagtgatgaattaacctcactgttgggatattttcccaacaaaaaacagcttgaagactggctacatagtaaatcaaaagaaattaatcagaccagggacagacttgccaaattgaacaaggaactagcttcatctgagcagaataaaaatcatataaataatgaactaaaaagaaaggaagagcagttgtccagttacgaagacaagctgtttgatgtttgtggtagccaggattttgaaagtgatttagacaggcttaaagaggaaattgaaaaatcatcaaaacagcgagccatgttggctggagccacagcagtttactcccagttcattactcagctaacagacgaaaaccagtcatgttgccccgtttgtcagagagtttttcagacagaggctgagttacaagaagtcatcagtgatttgcagtctaaactgcgacttgctccagataaactcaagtcaacagaatcagagctaaaaaaaaaggaaaagcggcgtgatgaaatgctgggacttgtgcccatgaggcaaagcataattgatttgaaggagaaggaaataccagaattaagaaacaaactgcagaatgtcaatagagacatacagcgcctaaagaacgacatagaagaacaagaaacactcttgggtacaataatgcctgaagaagaaagtgccaaagtatgcctgacagatgttacaattatggagaggttccagatggaacttaaagatgttgaaagaaaaattgcacaacaagcagctaagctacaaggaatagacttagatcgaactgtccaacaagtcaaccaggagaaacaagagaaacagcacaagttagacacagtttctagtaagattgaattgaatcgtaagcttatacaggaccagcaggaacagattcaacatctaaaaagtacaacaaatgagctaaaatctgagaaacttcagatatccactaatttgcaacgtcgtcagcaactggaggagcagactgtggaattatccactgaagttcagtctttgtacagagagataaaggatgctaaagagcaggtaagccctttggaaacaacattggaaaagttccagcaagaaaaagaagaattaatcaacaaaaaaaatacaagcaacaaaatagcacaggataaactgaatgatattaaagagaaggttaaaaatattcatggctatatgaaagacattgagaattatattcaagatgggaaagacgactataagaagcaaaaagaaactgaacttaataaagtaatagctcaactaagtgaatgcgagaaacacaaagaaaagataaatgaagatatgagactcatgagacaagatattgatacacagaagatacaagaaaggtggctacaagataaccttactttaagaaaaagaaatgaggaactaaaagaagttgaagaagaaagaaaacaacatttgaaggaaatgggtcaaatgcaggttttgcaaatgaaaagtgaacatcagaagttggaagagaacatagacaatataaaaagaaatcataatttggcattagggcgacagaaaggttatgaagaagaaattattcattttaagaaagaacttcgagaaccacaatttcgggatgctgaggaaaagtatagagaaatgatgattgttatgaggacaacagaacttgtgaacaaggatctcgatatttattataagactcttgaccaagcaataatgaaatttcacagtatgaaaatggaagaaatcaataaaattatacgtgacctgtggcgaagtacctatcgtggacaagatattgaatacatagaaatacggtctgatgccgatgaaaatgtatcagcttctgataaaaggcggaattataactaccgagtggtgatgctgaagggagacacagccttggatatgcgaggacgatgcagtgctggacaaaaggtattagcctcactcatcattcgcctggccctggctgaaacgttctgcctcaactgtggcatcattgccttggatgagccaacaacaaatcttgaccgagaaaacattgaatctcttgcacatgctctggttgagataataaaaagtcgctcacagcagcgtaacttccagcttctggtaatcactcatgatgaagattttgtggagcttttaggacgttctgaatatgtggagaaattctacaggattaaaaagaacatcgatcagtgctcagagattgtgaaatgcagtgttagctccctgggattcaatgttcattaaaaatatccaagatttaaatgccatagaaatgtaggtcctcagaaagtgtataataagaaacttatttctcatatcaacttagtcaataagaaaatatattctttcaaaggaaaaaaaaaaaaaaaaaaaaaaaaaaaaaaaaaaaaaaaaaaaaaaaaaaaaaaaaaaaaaaaaaaaaaaaaaaaaaaa

SEQ ID NO: 6435 - protein, 1312 aa, Homo sapien
MSRIEKMSILGVRSFGIEDKDKQIITFFSPLTILVGPNGAGKTTIIECLKYICTGDFPPGTKGNTFVHDPKVAQETDVRAQIRLQFRDVNGELIAVQRSMVCTQKSKKTEFKTLEGVITRTKHGEKVSLSSKCAEIDREMISSLGVSKAVLNNVIFCHQEDSNWPLSEGKALKQKFDEIFSATRYIKALETLRQVRQTQGQKVKEYQMELKYLKQYKEKACEIRDQITSKEAQLTSSKEIVKSYENELDPLKNRLKEIEHNLSKIMKLDNEIKALDSRKKQMEKDNSELEEKMEKVFQGTDEQLNDLYHNHQRTVREKERKLVDCHRELEKLNKESRLLNQEKSELLVEQGRLQLQADRHQEHIRARDSLIQSLATQLELDGFERGPFSERQIKNFHKLVRERQEGEAKTANQLMNDFAEKETLKQKQIDEIRDKKTGLGRIIELKSEILSKKQNELKNVKYELQQLEGSSDRILELDQELIKAERELSKAEKNSNVETLKMEVISLQNEKADLDRTLRKLDQEMEQLNHHTTTRTQMEMLTKDKADKDEQIRKIKSRHSDELTSLLGYFPNKKQLEDWLHSKSKEINQTRDRLAKLNKELASSEQNKNHINNELKRKEEQLSSYEDKLFDVCGSQDFESDLDRLKEEIEKSSKQRAMLAGATAVYSQFITQLTDENQSCCPVCQRVFQTEAELQEVISDLQSKLRLAPDKLKSTESELKKKEKRRDEMLGLVPMRQSIIDLKEKEIPELRNKLQNVNRDIQRLKNDIEEQETLLGTIMPEEESAKVCLTDVTIMERFQMELKDVERKIAQQAAKLQGIDLDRTVQQVNQEKQEKQHKLDTVSSKIELNRKLIQDQQEQIQHLKSTTNELKSEKLQISTNLQRRQQLEEQTVELSTEVQSLYREIKDAKEQVSPLETTLEKFQQEKEELINKKNTSNKIAQDKLNDIKEKVKNIHGYMKDIENYIQDGKDDYKKQKETELNKVIAQLSECEKHKEKINEDMRLMRQDIDTQKIQERWLQDNLTLRKRNEELKEVEEERKQHLKEMGQMQVLQMKSEHQKLEENIDNIKRNHNLALGRQKGYEEEIIHFKKELREPQFRDAEEKYREMMIVMRTTELVNKDLDIYYKTLDQAIMKFHSMKMEEINKIIRDLWRSTYRGQDIEYIEIRSDADENVSASDKRRNYNYRVVMLKGDTALDMRGRCSAGQKVLASLIIRLALAETFCLNCGIIALDEPTTNLDRENIESLAHALVEIIKSRSQQRNFQLLVITHDEDFVELLGRSEYVEKFYRIKKNIDQCSEIVKCSVSSLGFNVH

SEQ ID NO: 6436 - DNA, 2376 bp, Homo sapien; identical to SEQ ID NO: 3276

SEQ ID NO: 6437 - protein, 491 aa, Homo sapien [sequence omitted]

SEQ ID NO: 6438 - DNA, 1149 bp, Homo sapien; identical to SEQ ID NO: 3685

SEQ ID NO: 6439 - protein, 229 aa, Homo sapien; identical to SEQ ID NO: 3686

SEQ ID NO: 6440 - DNA, 1118 bp, Homo sapien
ctgatgaaagtgcttccaaactgaaaattggacgtgcctttacgatggtaagcgttaacagctcccactgcttctataatgactcctttaagtacactttgtatgggtgcatgttcagcatggtgtttgtgcttgggttagtatccaattgtgttgccatatacattttcatctgcgtcctcaaagtccgaaatgaaactacaacttacatgattaacttggcaatgtcagacttgctttttgtttttactttacccttcaggattttttacttcacaacacggaattggccatttggagatttactttgtaagatttctgtgatgctgttttataccaacatgtacggaagcattctgttcttaacctgtattagtgtagatcgatttctggcaattgtctacccatttaagtcaaagactctaagaaccaaaagaaatgcaaagattgtttgcactggcgtgtggttaactgtgatcggaggaagtgcacccgccgtttttgttcagtctacccactctcagggtaacaatgcctcagaagcctgctttgaaaattttccagaagccacatggaaaacatatctctcaaggattgtaattttcatcgaaatagtgggattttttattcctctaattttaaatgtaacttgttctagtatggtgctaaaaactttaaccaaaccagttacattaagtagaagcaaaataaacaaaactaaggttttaaaaatgatttttgtacatttgatcatattctgtttctgttttgttccttacaatatcaatcttattttatattctcttgtgagaacacaaacatttgttaattgctcagtagtggcagcagtaaggacaatgtacccaatcactctctgtattgctgtttccaactgttgttttgaccctatagtttactactttacatcggacacaattcagaattcaataaaaatgaaaaactggtctgtcaggagaagtgacttcagattctctgaagttcatggtgcagagaattttattcagcataacctacagaccttaaaaagtaagatatttgacaatgaatctgctgcctgaaataaaaccattaggactcactgggacagaactttcaag

SEQ ID NO: 6441 - protein, 344 aa, Homo sapien
MVSVNSSHCFYNDSFKYTLYGCMFSMVFVLGLVSNCVAIYIFICVLKVRNETTTYMINLAMSDLLFVFTLPFRIFYFTTRNWPFGDLLCKISVMLFYTNMYGSILFLTCISVDRFLAIVYPFKSKTLRTKRNAKIVCTGVWLTVIGGSAPAVFVQSTHSQGNNASEACFENFPEATWKTYLSRIVIFIEIVGFFIPLILNVTCSSMVLKTLTKPVTLSRSKINKTKVLKMIFVHLIIFCFCFVPYNINLILYSLVRTQTFVNCSVVAAVRTMYPITLCIAVSNCCFDPIVYYFTSDTIQNSIKMKNWSVRRSDFRFSEVHGAENFIQHNLQTLKSKIFDNESAA

SEQ ID NO: 6442 - DNA, 2058 bp, Homo sapien
ggcacgagggttacccctttgctttgttttatcggcattaccttttctacaaggagacctacctcatccacctcttccatacctttacaggcctctcaattgcttattttaactttggaaaccagctctaccactccctgctgtgtattgtgcttcagttcctcatccttcgactaatgggccgcaccatcactgccgtcctcactaccttttgcttccagatggcctaccttctggctggatactattacactgccaccggcaactacgatatcaagtggacaatgccacattgtgttctgactttgaagctgattggtttggctgttgactactttgacggagggaaagatcagaattccttgtcctctgagcaacagaaatatgccatacgtggtgttccttccctgctggaagttgctggtttctcctacttctatggggccttcttggtagggccccagttctcaatgaatcactacatgaagctggtgcagggagagctgattgacataccaggaaagataccaaacagcatcattcctgctctcaagcgcctgagtctgggccttttctacctagtgggctacacactgctcagcccccacatcacagaagactatctcctcactgaagactatgacaaccaccccttctggttccgctgcatgtacatgctgatctggggcaagtttgtgctgtacaaatatgtcacctgttggctggtcacagaaggagtatgcattttgacgggcctgggcttcaatggctttgaagaaaagggcaaggcaaagtgggatgcctgtgccaacatgaaggtgtggctctttgaaacaaacccccgcttcactggcaccattgcctcattcaacatcaacaccaacgcctgggtggcccgctacatcttcaaacgactcaagttccttggaaataaagaactctctcagggtctctcgttgctattcctggccctctggcacggcctgcactcaggatacctggtctgcttccagatgaaattcctcattgttattgtggaaagacaggctgccaggctcattcaagagagccccaccctgagcaagctggccgccattactgtcctccagcccttctactatttggtgcaacagaccatccactggctcttcatgggttactccatgactgccttctgcctcttcacgtgggacaaatggcttaaggtgtataaatccatctatttccttggccacatcttcttcctgagcctactattcatattgccttatattcacaaagcaatggtgccaaggaaagagaagttaaagaagatggaataatccatttccctggtggcctgtgcgggactggtgcagaaactactcgtctcccttttcacagcactcctttgccccagagcagagaatggaaaagccagggaggtggaagatcgatgcttccagctgtgcctctgctgccagccaagtcttcatttggggccaaaggggaaacttttttttggagaaggcgtcttgctttgtcacccacgctggaatgcagtggcgggatctcagctcaccgcaacctccacctcctgggttcaagtgattttcctgcctcagcctcccaagtagctgggaatacaggcacgccaccatgcccagctaatttttgtattttcagtagaaacgggatttcaccacgttggccaggctggtctcgaactcctgaccgcaagtgatccacccgcctccgcctcccaaagtgctgggattacaggcgtgagccaccgtgcccggcccaaaggggaaactcttgtgggaggagcagaggggctcacatctcccctctgattcccccatgcacattgccttatctctccccatctagccaggaatctattgtgtttttcttctgccaatttactatgattgtgtatgtgccgctaccaccaccccccccatgggggggtggagaggggtgcaaggccctgcctgctccactttttctaccttggaactgtattagataaaatcacttctgtttgttcagtttttcaaaaaaaaaaaaaaaaaa

SEQ ID NO: 6443 - protein, 381 aa, Homo sapien
MGRTITAVLTTFCFQMAYLLAGYYYTATGNYDIKWTMPHCVLTLKLIGLAVDYFDGGKDQNSLSSEQQKYAIRGVPSLLEVAGFSYFYGAFLVGPQFSMNHYMKLVQGELIDIPGKIPNSIIPALKRLSLGLFYLVGYTLLSPHITEDYLLTEDYDNHPFWFRCMYMLIWGKFVLYKYVTCWLVTEGVCILTGLGFNGFEEKGKAKWDACANMKVWLFETNPRFTGTIASFNINTNAWVARYIFKRLKFLGNKELSQGLSLLFLALWHGLHSGYLVCFQMKFLIVIVERQAARLIQESPTLSKLAAITVLQPFYYLVQQTIHWLFMGYSMTAFCLFTWDKWLKVYKSIYFLGHIFFLSLLFILPYIHKAMVPRKEKLKKME

SEQ ID NO: 6444 - DNA, 683 bp, Homo sapien
gggctgcaggaattcggcacgagcttagctgaagatgactgacagtgttatttattccatgttagagttgcctacggcaacccaagcccagaatgactatggaccacagcaaaaatcttcctcttccaggccttcttgttcttgccttgtggcaatagctttggggcttctgactgcagttcttctgagtgtgctgctataccagtggatcctgtgccagggctccaactactccacttgtgccagctgtcctagctgcccagaccgctggatgaaatatggtaaccattgttattatttctcagtggaggaaaaggactggaattctagtctggaattctgcctagccagagactcacacctccttgtgataacggacaatcaggaaatgagcctgctccaagttttcctcagtgaggccttttgctggattggtctgaggaacaattctggctggaggtgggaagatggatcacctctaaacttctcaaggatttcttctaatagctttgtgcagacatgcggtgccatcaacaaaaatggtcttcaagcctcaagctgtgaagttcctttacactgggtgtgtaagaaggtcagactttgatagatgaccactctgtcctgaccctcagatctgtcatgtatccctaaaaggagggagctggccactggctgttgggaaa

SEQ ID NO: 6445 - protein, 189 aa, Homo sapien
MTDSVIYSMLELPTATQAQNDYGPQQKSSSSRPSCSCLVAIALGLLTAVLLSVLLYQWILCQGSNYSTCASCPSCPDRWMKYGNHCYYFSVEEKDWNSSLEFCLARDSHLLVITDNQEMSLLQVFLSEAFCWIGLRNNSGWRWEDGSPLNFSRISSNSFVQTCGAINKNGLQASSCEVPLHWVCKKVRL

SEQ ID NO: 6446 - DNA, 2793 bp, Homo sapien; identical to SEQ ID NO: 1708

SEQ ID NO: 6447 - protein, 319 aa, Homo sapien; identical to SEQ ID NO: 1709

SEQ ID NO: 6448 - DNA, 5205 bp, Homo sapien; identical to SEQ ID NO: 1806

SEQ ID NO: 6449 - protein, 569 aa, Homo sapien; identical to SEQ ID NO: 1807

SEQ ID NO: 6450 - DNA, 3184 bp, Homo sapien
ctctgctgtgctgcctcaaacgcggagggctgcgtgcagtgggagcgggctccaggagcccgagcctccagccgtcctcagagcaaggcagcaccgaggcctggccacagcaatatccatctggaagctcttcccttcactcccaactctgaggttgcctaactctttattaaaaattcagaagggggaatgccagcccctagcatggactgtgatgtttccactctggttgcctgtgtggtggatgtcgaggtctttaccaatcaggaggttaaggaaaaatttgggggactgtttcggacttatgatgactgtgtgacgttccagctatttaagagtttcagacgtgtccgtataaacttcagcaatcctaaatctgcagcccgagctaggatagagcttcatgaaacccaattcagagggaaaaaattaaagctctactttgcacaggttcagactccagagacagatggagacaaactgcacttggctccaccccagcctgccaaacagtttctcatctcgcccccttcctccccacctgttagctggcagcccatcaacgatgccacgccagtcctcaactatgacctcctctatgctgtggccaaactaggaccaggagagaagtatgagctccatgcagggactgagtccaccccaagtgtcgtcgtgcacgtgtgcgacagtgacatagaggaagaagaggacccaaagacttccccaaagccaaaaatcatccaaactcggcgtcctggcctgccaccctccgtgtccaactgagctgcctgctccttctcgataatagccgtctcctctttatcatgctttttccccctgttgtttgtcaaaaaaaattgcctttaaattcctgggtgtttggttgtttgagattccttccttgttatcaagcctctcggacaaaagggctaggaaaaggtgatatgtctcctgatcatatcatacccattaagtataacccattatttagaaggttctagggaaaaaagtagtattttcttattaaacaatcagcacagcctatatctttgttctctcatgttgatccaagccagagacatcggtaacaaatagcacctgtgttgtttgtgaggtgtttcagtcccagtcctgatgtgtgtgcgttgttctctcctggccacttaaataggaccatatgtaaacttgactttgactgcatgagatatccctatctggtctcactcagtcctctgcatcccaacattcccaggacatgcatgatcaccagcatttattttcattatttgaggatatcttataactcacagattgtcagcatccagccatgtcctatctagattaggaaaatgatcagaatattccagctcaacaagtctgggtatactcactattgtgagtcaatacaccatagctctgttgaaattcctggaggcaaaattgaccttggccccaaagatattcctcaatagatttcaaacaccactcccctgtagaactctcccagcctcgttggggaggcttgtccagggtgatagagactgatttcagacaaacctatttattacaaaagtttcatggtgtctgaatgattgttttctctctttgtatatttgtacaaatgtttcagctgtgcttttaaaaaatctggatgttttttatttagtgattgttcgacaattagctgcttcaaaacataatgtgcattgcttatgaatgccttcatatactaatacagatactctgataatattacactctaataaggataatgctgaattttgaaaggacacaaaacatctaatgccaatatatacatggttagccaacatctttgctatcaagaccacttgttttaaataaagatgcaagtgtcagttgtagattattgggatgaagctaaatccccagaatgcagcagcagctgagcatgttaaaatggggaaggatgatagctacatgtatgccggtcctactcacgcgacacccgtgtgctcaaaaaagttacttgtttttgttacgtgtgattttcctatttctctagcccaaagtgcattacagaagatacacctatagaaccattaccttctgctatgtgtgccagggctcatctactcctgtacattaatggattactttagatgcaaatgcagattacaatggagtggggaagtactttcattacccaagcctcagaaaaacacacaagaacaataacacagcaaacagattgagggattgttgtggtttttgactaaggtgtatgttagtttcatcagaaacttaaaacatagactgatcactcagaaattaaagtccgttttactgtgaatatagcaatatagtactggacacagtactggtgaaactgaggagagcattgcttgtaaaatcctgagtttccataaggaaaatgaaaactccttttaaaaataaaatctgaggagtgtacaataagcatatgctttgactttcctttgctgtggaggtttttggtttttcattgatgataaacgactacagacttagtagtggagaaatggtgtcctctagtggaagaaatagtagctccgctattcagatgcagagcactgcagcatccagcctttcaaagctgactcttctcaatcatctgtgggtcatttgacttgattttttaagctaccctgaatttccagaatgcaggttctaaagaaatctagatgagagaaagtatttgaaaatgatttttaaatgttttttaaaagacacatctgacatttttaacaacttagtaaaagttgaaatgaccattctgtgtagtcataaaagaaacacaatgaagtgtatggcctctggagttagtcttagtaaaacttattgctctgtgtcaatgttaacctgtctcagatcaagtaattccttcactaggttgggtttggggaggggggaaaagaggggcttttcctaggagaacgataagaaatggaaagactccttgaagtgttgcaagggaacctcctagcactgtgaaagtcagaatcgcctcagcatttccatgacgcacattatgcaaatctctttagcactattttaaggttgaaaactttaacaatgaaggggaaggggaagatttccaccaactgaatcatttgtgcacgtgtatagctcaaagagcttagacttcaaatatatctggtgaatg

SEQ ID NO: 6451 - protein, 192 aa, Homo sapien
MDCDVSTLVACVVDVEVFTNQEVKEKFGGLFRTYDDCVTFQLFKSFRRVRINFSNPKSAARARIELHETQFRGKKLKLYFAQVQTPETDGDKLHLAPPQPAKQFLISPPSSPPVSWQPINDATPVLNYDLLYAVAKLGPGEKYELHAGTESTPSVVVHVCDSDIEEEEDPKTSPKPKIIQTRRPGLPPSVSN

SEQ ID NO: 6452 - DNA, 3477 bp, Homo sapien; identical to SEQ ID NO: 163

SEQ ID NO: 6453 - protein, 656 aa, Homo sapien; identical to SEQ ID NO: 164

SEQ ID NO: 6454 - DNA, 1268 bp, Homo sapien; identical to SEQ ID NO: 280

SEQ ID NO: 6455 - protein, 334 aa, Homo sapien; identical to SEQ ID NO: 281

SEQ ID NO: 6456 - DNA, 911 bp, Homo sapien
cccacgcgtccggtcagagctggagggccgggcaccgcggccatggagggtcaacgctggctgccgctggaggccaatcccgaggtcaccaaccagtttcttaaacaattaggtctacatcctaactggcaattcgttgatgtatatggaatggatcctgaactccttagcatggtaccaagaccagtctgtgcagtcttacttctctttcctattacagaaaagtatgaagtattcagaacagaagaggaagaaaaaataaaatctcagggacaagatgttacatcatcagtatatttcatgaagcaaacaatcagcaatgcctgtggaacaattggactgattcatgctattgcaaacaataaagacaagatgcactttgaatctggatcaaccttgaaaaaattcctggaggaatctgtgtcaatgagccctgaagaacgagccagatacctggagaactatgatgccatccgagttactcatgagaccagtgcccatgaaggtcagactgaggcaccaagtatagatgagaaagtagatcttcattttattgcattagttcatgtagatgggcatctctatgaattagatgggcggaagccatttccaattaaccatggtgaaactagtgatgaaactttattagaggatgccatagaagtttgcaagaagtttatggagcgcgaccctgatgaactaagatttaatgcgattgctctttctgcagcatagcttgtcaataatggaaacaccaaaaactgtattatttgcaactaaattttctctgccatacactaactcaaaaattttgatattttcattaacttgatgattaaactttatgtgagttaaaaaaaaaaaaaaaaaaaaaaaaaaaaaaaaaaaaaaaaaaaaaaaaaaaaaaaaaa

SEQ ID NO: 6457 - protein, 230 aa, Homo sapien
MEGQRWLPLEANPEVTNQFLKQLGLHPNWQFVDVYGMDPELLSMVPRPVCAVLLLFPITEKYEVFRTEEEEKIKSQGQDVTSSVYFMKQTISNACGTIGLIHAIANNKDKMHFESGSTLKKFLEESVSMSPEERARYLENYDAIRVTHETSAHEGQTEAPSIDEKVDLHFIALVHVDGHLYELDGRKPFPINHGETSDETLLEDAIEVCKKFMERDPDELRFNAIALSAA

SEQ ID NO: 6458 - DNA, 1750 bp, Homo sapien
gatgcctgatctcatcaatctagcgggagagacaggataacctgtccgagagtatagcgccacttatgactccgccggaaaaattactttaaaaatcgccaaaaattacttggagcaaagggcagtccggcggcgttcgccaaggtggcgcagtcggttttgacctgtagcagagaaccaattctggagaacagcctcacttctttgattgaatacttacataatgcattggaacatgacatgagattaaggtttaataatgatagaatgaagaccacaataaaagagaccacaatccttagctcagcaattcttacctttcttacctatttgatgaagatgtcttttgaaaggtgtactgcaaggaacaaaatgtttgtaaattctcccttttacccaagggtggataattactgtacctcctcatggaaaaagttttatttaaagtgttatttctcattgaatactatcaaaaaggaaaaaaaaatgacctaaacttttgagatagatttggctctagtaagtatttagttatatcacttgcatatctgggagaagaaataagagactatcatcagtacattcccatctactaaaaaaatttattttacacatgtcaagggattacttataacttccattttattactaatagcttgaacccttttaatgaagacctaactcctccaccagaaatttaagtttatgttcttactttgtttacttataaaatacatctcaggtatttcggatgtcttttttttttctaagcctatatgaaatgaaaaatatattggcaaagtaaatgtttaaaccttttacgttaaaattactttgaaagatgaaaagttagtgctgtttttgtcacgttatactgaaattaaatgtttataatttatattttgggtttatgtataaatcatggaatttatgcaaaaatatgagtagtacagattctcctctaattctgtaggactttgaataatgtgatatttttcttataattggacccttgtgttttgaagaaatgccaactgcttgaagaatctccttgttatttgtattatttgctatagggttagatgttgagaaattctgctgacaaaaaattttaagccagttttacactaaatgttcctcagtctgattaatttgttattggatgtattctgtatctttcttttgtaatttgtgacttttatccacttagcacgaatgattctattaaagaaaatcattaggaagtggtagaaactttaaatcgccccagagtttgcctgtttccatattttattatcttataatcttcgggagtgcttacacttatggagctaacattttcagagatacagcttcttatagtaacactaaaactttcttcctctttggactgaatacctataattataactatatggtagtttaagtttccttgtgattagtcaaaaataccattttagtatgaagcaatgaagtctattatttgttgtcccataattgagaaagcttaaatacaccttttatgtaagagtttagtaagattctagcttagtctacacagatttttatatcaatttgtttatatttttattaatgtcatttctggaagtgtgaaaatgttaatgttcaacaagcaacattaaaaatagatttgaaacatttatatatagagaggtacacatttatttactgtttaggtactgaagattatcacttaataaaaaatatatatcccaaaaaaaaaaaaaaa

SEQ ID NO: 6459 - protein, 84 aa, Homo sapien
MRLRFNNDRMKTTIKETTILSSAILTFLTYLMKMSFERCTARNKMFVNSPFYPRVDNYCTSSWKKFYLKCYFSLNTIKKEKKMT

SEQ ID NO: 6460 - DNA, 2524 bp, Homo sapien
ctgtcctcggagcaggcggagtaaagggacttgagcgagccagttgccggattattctatttcccctccctctctcccgccccgtatctcttttcacccttctcccaccctcgctcgcgtagccatggcggagccatcggcggccactcagtcccattccatctcctcgtcgtccttcggagccgagccgtccgcgcccggcggcggcgggagcccaggagcctgccccgccctggggacgaagagctgcagctcctcctgtgcggtgcacgatctgattttctggagagatgtgaagaagactgggtttgtctttggcaccacgctgatcatgctgctttccctggcagctttcagtgtcatcagtgtggtttcttacctcatcctggctcttctctctgtcaccatcagcttcaggatctacaagtccgtcatccaagctgtacagaagtcagaagaaggccatccattcaaagcctacctggacgtagacattactctgtcctcagaagctttccataattacatgaatgctgccatggtgcacatcaacagggccctgaaactcattattcgtctctttctggtagaagatctggttgactccttgaagctggctgtcttcatgtggctgatgacctatgttggtgctgtttttaacggaatcacccttctaattcttgctgaactgctcattttcagtgtcccgattgtctatgagaagtacaagacccagattgatcactatgttggcatcgcccgagatcagaccaagtcaattgttgaaaagatccaagcaaaactccctggaatcgccaaaaaaaaggcagaataagtacatggaaaccagaaatgcaacagttactaaaacaccatttaatagttataacgtcgttacttgtactatgaaggaaaatactcagtgtcagcttgagcctgcattccaagctttttttttaatttggtgttttctcccatcctttccctttaaccctcagtatcaagcacaaaaattgatggactgataaaagaactatcttagaactcagaagaagaaagaatcaaattcataggataagtcaataccttaatggtggtagagcctttacctgtagcttgaaaggggaaagattggaggtaagagagaaaatgaaagaacacctctgggtccttctgtccagttttcagcactagtcttactcagctatccattatagttttgcccttaagaagtcatgattaasttatgaaaaaattatttgggggacaggagtgtggataccttccttgggtttttttttgcagccctcaaatccctatcttcctgccccacaatgtgagcagctacccctggatactccttttctttaatgatttaactatcaacttgataaataacttataggtgatagtgataattcctgattccaagaatgccatctgataaaaaagaatagaaatggaaagtgggactgagagggagtcagcaggcatgctgcggtggcggtcactccctctgccactatccccagggaaggaaaggctccgccatttgggaaagtggtttctacgtcactggacaccggttctgagcattagtttgagaactcgttcccgaatgtgctttcctccctctcccctgcccacctcaagtttaataaataaggttgtacttttcttactataaaataaatgtctgtaactgctgtgcactgctgtaaacttgttagagaaaaaaataacctgcatgtgggctcctcagttattgagtttttgtgatcctatctcagtctgggggggaacattctcaagaggtgaaatacagaaagcctttttttcttgatcttttcccgagattcaaatctccgattcccatttgggggcaagtttttttcttcaccttcaatatgagaattcagcgaacttgaaagaaaaatcatctgtgagttccttcaggttctcactcatagtcatgatccttcacagggaatatgcactggcgagtttaaagtaagggctatgatatttgatggtcccaaagtacggcagctgcaaaaagtattggaaggaaattgtctacgtgtcttggaaaaattagttaggaatttggatgggtaaaaggtacccttgccttactccatcttattttcttagccccctttgagtgttttaactggtttcatgtcctagtaggaagtgcattctccatcctcatcctctgccctcccaggaagtcagtgattgtctttttgggcttcccctccaaaggaccttctgcagtggaagtgccacatccagttcttttcttttgttgctgctgtgtttagataattgaagagatctttgtgccacacaggattttttttttttttaagaaaaacctatagatgaaaaattactaatgaaactgtgtgtacgtgtctgtgcgtgcaacataaaaatacagtagcacctaaggagcttgaatcttggttcctgtaaaatttcaaattgatgtggtattaataaaaaaaaaaaaaaacac

SEQ ID NO: 6461 - protein, 236 aa, Homo sapien
MAEPSAATQSHSISSSSFGAEPSAPGGGGSPGACPALGTKSCSSSCAVHDLIFWRDVKKTGFVFGTTLIMLLSLAAFSVISVVSYLILALLSVTISFRIYKSVIQAVQKSEEGHPFKAYLDVDITLSSEAFHNYMNAAMVHINRALKLIIRLFLVEDLVDSLKLAVFMWLMTYVGAVFNGITLLILAELLIFSVPIVYEKYKTQIDHYVGIARDQTKSIVEKIQAKLPGIAKKKAE

SEQ ID NO: 6462 - DNA, 1100 bp, Homo sapien
ctaaagctgggttggtagctcctacctactgtgtggcaagaaggtatgggtcatgaacagaaccaaggagctgcgctgctacagatgttaccacttctgtggctgctaccccactcctgggccgtccctgaagctcctactccaatgtggccagatgacctgcaaaaccacacattcctgcacacagtgtactgccaggatgggagtcccagtgtgggactctctgaggcctacgacgaggaccagcttttcttcttcgacttttcccagaacactcgggtgcctcgcctgcccgaatttgctgactgggctcaggaacagggagatgctcctgccattttatttgacaaagagttctgcgagtggatgatccagcaaatagggccaaaacttgatgggaaaatcccggtgtccagagggtttcctatcgctgaagtgttcacgctgaagcccctggagtttggcaagcccaacactttggtctgttttgtcagtaatctcttcccacccatgctgacagtgaactggcacgatcattccgtccctgtggaaggatttgggcctacttttgtctcagctgtcgatggactcagcttccaggccttttcttacttaaacttcacaccagaaccttctgacattttctcctgcattgtgactcacgaaattgaccgctacacagcaattgcctattgggtaccccggaacgcactgccctcagatctgctggagaatgtgctgtgtggcgtggcctttggcctgggtgtgctgggcatcatcgtgggcattgttctcatcatctacttccggaagccttgctcaggtgactgattcttccagaccagagtttgatgccagcagcttcggccatccaaacagaggatgctcagatttctcacatcctgcccaggatctcctcttagggtagaagaagtctctgggacatccctggggtgtgtgtgtagatttcccacctggggactctgctgtccctgggcttgcatcccagggatcccagagtggcctgcctatcacaaccacatcccttccccccacaaggcaataaatctcatttctttaaaaaaaaaaaaaaaaaaaaa

SEQ ID NO: 6463 - protein, 261 aa, Homo sapien
MGHEQNQGAALLQMLPLLWLLPHSWAVPEAPTPMWPDDLQNHTFLHTVYCQDGSPSVGLSEAYDEDQLFFFDFSQNTRVPRLPEFADWAQEQGDAPAILFDKEFCEWMIQQIGPKLDGKIPVSRGFPIAEVFTLKPLEFGKPNTLVCFVSNLFPPMLTVNWHDHSVPVEGFGPTFVSAVDGLSFQAFSYLNFTPEPSDIFSCIVTHEIDRYTAIAYWVPRNALPSDLLENVLCGVAFGLGVLGIIVGIVLIIYFRKPCSGD

SEQ ID NO: 6464 - DNA, 1646 bp, Homo sapien
tagtgatcttttctgagtgtctcctacttgcgacaaggtggacttgggaggaaagccgtctgccaaagcctgaagcctccaagccataaacaaccccaatggcctcccacgaagttgataatgcagagctggggtcagcctctgcccatggtaccccaggcagtgagacgggaccagaagagctgaatacttctgtctaccaccccataaatggatcaccagattatcagaaagcaaaattacaagttcttggggccatccagatcctgaatgcagcaatgattctggctttgggtgtctttctgggttccttgcaatacccataccacttccaaaagcacttctttttcttcaccttctacacaggctacccgatttggggtgctgtgtttttctgtagttcaggaaccttgtctgttgtagcagggataaaacccacaagaacatggatacagaacagttttggaatgaacattgccagtgctacaattgcactagtggggactgcttttctctcactaaatatagcagttaatatccagtcattaaggagttgtcactcttcatcagagtcaccggacctatgcaattacatgggctccatatcaaatggcatggtgtctctactgctgattctcaccttgctggaattatgcgtaactatctctaccatagccatgtggtgcaatgcaaactgctgtaattcaagagaggaaatttcctcacctcccaattctgtgtaatcaagaatacctccttatgaaaataattctgagagcatgaatatttgaccttaaatctccagtgactcagagcttcacccacaaactcaggagaacataagcctgctcgtaaagctcaatccttctatcatggcaccaatcacaagaaccttggacgtttgactgactctatcctttctctcctaactataaatcctatttgtgtgtcgtgggtatggaaggacagatatatttctttaggcattcttggatatctgtaacttctatgatcattactccaaagttgtttccagaaattggttctatttcttcttatccacctactccattgctttatgaggtttaaggaaggaaggcggtataatccctattcaatatattttttctaaaatccaacttctgaccgcccagtaggaagaaaaatgagacattttttccattacagagaaatgcttcttgactttaacatcagcattataaaaagtgtcaaataaaaaattaccatcattatcattaaaataaattttcactgtatttgagatgggagggttaaggctcagggattttatttcagtgaactgctggaactcacacatgccctgatatgtaaatgatgatttatgttggcgagtctgagagcaagcccaaatgtgttcttcaaaggacaatgggaaactgtaaagtagagaactaaagaataaggcctttagaatctgacacatctgggttcaaattctgaaactgtcacttattacctgtatgaacatgggcaaattatctaatctctctgatctatttttcctcatctgtaaaataggtgtaataataacaactactttgtcggttgctctgagggttaaatgaaaataaaaagaaaatgtgaaacagcaccacaggtacttg

SEQ ID NO: 6465 - protein, 214 aa, Homo sapien; identical to SEQ ID NO: 2418

SEQ ID NO: 6466 - DNA, 3230 bp, Homo sapien
aaaggttagtgttttagtgtctctgtcatttgacagttaatattatgaatagttgtgcccacagtcttagaactccttccatgacattgtccctccatactgacacttctctttcctgcaggtgaggagtaagaggagcaggctcctgcacagtgactacatgaacatgactccccgccgccccgggcccacccgcaagcattaccagccctatgccccaccacgcgacttcgcagcctatcgctcctgacacggacgcctatccagaagccagccggctggcagcccccatctgctcaatatcactgctctggataggaaatgaccgccatctccagccggccacctcaggcccctgttgggccaccaatgccaatttttctcgagtgactagaccaaatatcaagatcattttgagactctgaaatgaagtaaaagagatttcctgtgacaggccaagtcttacagtgccatggcccacattccaacttaccatgtacttagtgacttgactgagaagttagggtagaaaacaaaaagggagtggattctgggagcctcttccctttctcactcacctgcacatctcagtcaagcaaagtgtggtatccacagacattttagttgcagaagaaaggctaggaaatcattccttttggttaaatgggtgtttaatcttttggttagtgggttaaacggggtaagttagagtagggggagggataggaagacatatttaaaaaccattaaaacactgtctcccactcatgaaatgagccacgtagttcctatttaatgctgttttcctttagtttagaaatacatagacattgtcttttatgaattctgatcatatttagtcattttgaccaaatgagggatttggtcaaatgagggattccctcaaagcaatatcaggtaaaccaagttgctttcctcactccctgtcatgagacttcagtgttaatgttcacaatatactttcgaaagaataaaatagttctcctacatgaagaaagaatatgtcaggaaataaggtcactttatgtcaaaattatttgagtactatgggacctggcgcagtggctcatgcttgtaatcccagcactttgggaggccgaggtgggcagatcacttgagatcaggaccagcctggtcaagatggtgaaactccgtctgtactaaaaatacaaaatttagcttggcctggtggcaggcacctgtaatcccagctgcccaggaggctgaggcatgagaatcgcttgaacctggcaggcggaggttgcagtgagccgagatagtgccacagctctccagcctgggcgacagagtgagactccatctcaaacaacaacaacaacaacaacaacaacaacaaaccacaaaattatttgagtactgtgaaggattatttgtctaacagttcattccaatcagaccaggtaggagctttcctgtttcatatgtttcagggttgcacagttggtctctttaatgtcggtgtggagatccaaagtgggttgtggaaagagcgtccataggagaagtgagaatactgtgaaaagggatgttagcattcattagagtatgaggatgagtcccaagaaggttctttggaaggaggacgaatagaatggagtaatgaaattcttgccatgtgctgaggagatagccagcattaggtgacaatcttccagaagtggtcaggcagaaggtgccctggtgagagctcctttacagggactttatgtggtttagggctcagagctccaaaactctgggctcagctgctcctgtaccttggaggtccattcacatgggaaagtattttggaatgtgtcttttgaagagagcatcagagttcttaagggactgggtaaggcctgaccctgaaatgaccatggatatttttctacctacagtttgagtcaactagaatatgcctggggaccttgaagaatgcccttcagtggccctcaccatttgttcatgcttcagttaattcaggtgttgaaggagcttaggttttagaggcacgtagacttggttcaagtctcgttagtagttgaatagcctcaggcaagtcactgcccacctaagatgatggttcttcaactataaatggagataatggttacaaatgtctcttcctatagtataatctccataagggcatggcccaagtctgtctttgactctgcctatccctgacgtttagtagcatgcccgacatacaatgttagctattggtattattgccatatagataaattatgtataaaaattaaactgggcaatagcctaagaaggggggaatattgtaacacaaatttaaacccactacgcagggatgaggtgctataatatgaggaccttttaacttccatcattttcctgtttcttgaaatagtttatcttgtaatgaaatataaggcacctcccacttttatgtatagaaagaggtcttttaatttttttttaatgtgagaaggaagggaggagtaggaatcttgagattccatatcgaaaatactgtactttggttgatttttaagtgggcttccattccatggatttaatcagtcccaagaagatcaaactcagcagtacttgggtgctgaagaactgttggatttaccctggcacgtgtgccacttgcccagcttcttgggcacacagagttcttcaatccaagttatcagattgtatttgaaaatgacagagctggagagttttttgaaatggcagtggcaaataaataaatacttttttttaaatggaaagacttgatctatggtaataaatgattttgttttctgactggaaaaataggcctactaaagatgaatcacacttgagatgtttcttactcactctgcacagaaacaaagaagaaatgttatacagggaagtccgttttcactattagtatgaaccaagaaatggttcaaaaacagtggtaggagcaatgctttcatagtttcagatatggtagttatgaagaaaacaatgtcatttgctgctattattgtaagagtcttataattaatggtactcctataatttttgattgtgagctcacctatttgggttaagcatgccaatttaaagagaccaagtgtatgtacattatgttctacatattcagtgataaaattactaaactactatatgtctgctttaaatttgtactttaatattgtcttttggtattaagaaagatatgcttt

SEQ ID NO: 6467 - DNA, 1409 bp, Homo sapien; identical to SEQ ID NO: 1854

SEQ ID NO: 6468 - protein, 415 aa, Homo sapien; identical to SEQ ID NO: 1855

SEQ ID NO: 6469 - DNA, 849 bp, Homo sapien
atgaggaactcctatagatttctggcatcctctctctcagttgtcgtttctctcctgctaattcctgaagatgtctgtgaaaaaattattggaggaaatgaagtaactcctcattcaagaccctacatggtcctacttagtcttgacagaaaaaccatctgtgctggggctttgattgcaaaagactgggtgttgactgcagctcactgtaacttgaacaaaaggtcccaggtcattcttggggctcactcaataaccagggaagagccaacaaaacagataatgcttgttaagaaagagtttccctatccatgctatgacccagccacacgcgaaggtgaccttaaacttttacagctgacggaaaaagcaaaaattaacaaatatgtgactatccttcatctacctaaaaagggggatgatgtgaaaccaggaaccatgtgccaagttgcagggtgggggaggactcacaatagtgcatcttggtccgatactctgagagaagtcaatatcaccatcatagacagaaaagtctgcaatgatcgaaatcactataattttaaccctgtgattggaatgaatatggtttgtgctggaagcctccgaggtggaagagactcgtgcaatggagattctggaagccctttgttgtgcgagggtgttttccgaggggtcacttcctttggccttgaaaataaatgcggagaccctcgtgggcctggtgtctatattcttctctcaaagaaacacctcaactggataattatgactatcaagggagcagtttaaataaccgtttcctttcatttactgtggcttcttaatcttttcacaaataaaatcaatttg

SEQ ID NO: 6470 - protein, 262 aa, Homo sapien; identical to SEQ ID NO: 1629

SEQ ID NO: 6471 - DNA, 2417 bp, Homo sapien; identical to SEQ ID NO: 49

SEQ ID NO: 6472 - protein, 555 aa, Homo sapien; identical to SEQ ID NO: 1401

SEQ ID NO: 6473 - DNA, 3422 bp, Homo sapien
ccccgacggagccgcgccggggcgagtccgacccctccctccgggccccctccgggccgcgctgccgcctcggccctgcgtgtgggaatgatgtgcgcattggagggtctaagttcttcacgcgcctggggaggcctcccttttctttcttaggcaaccaaagcgtattaatcctactgatcagtaaatccgaggcagcagcaggagagacaaacgttattttcccgcttgattccaagaacctcttcgatttttatttttatttttaaagagggagacgatggactgagctgatccgcaccatggagtctcgggtcttactgagaacattctgtttgatcttcggtctcggagcagtttgggggcttggtgtggacccttccctacagattgacgtcttaacagagttagaacttggggagtccacgaccggagtgcgtcaggtcccggggctgcataatgggacgaaagcctttctctttcaagatactcccagaagcataaaagcatccactgctacagctgaacagttttttcagaagctgagaaataaacatgaatttactattttggtgaccctaaaacagacccacttaaattcaggagttattctctcaattcaccacttggatcacaggtacctggaactggaaagtagtggccatcggaatgaagtcagactgcattaccgctcaggcagtcaccgccctcacacagaagtgtttccttacattttggctgatgacaagtggcacaagctctccttagccatcagtgcttcccatttgattttacacattgactgcaataaaatttatgaaagggtagtagaaaagccctccacagacttgcctctaggcacaacattttggctaggacagagaaataatgcgcatggatattttaagggtataatgcaagatgtccaattacttgtcatgccccagggatttattgctcagtgcccagatcttaatcgcacctgtccaacttgcaatgacttccatggacttgtgcagaaaatcatggagctacaggatattttagccaaaacatcagccaagctgtctcgagctgaacagcgaatgaatagattggatcagtgctattgtgaaaggacttgcaccatgaagggaaccacctaccgagaatttgagtcctggatagacggctgtaagaactgcacatgcctgaatggaaccatccagtgtgaaactctaatctgcccaaatcctgactgcccacttaagtcggctcttgcgtatgtggatggcaaatgctgtaaggaatgcaaatcgatatgccaatttcaaggacgaacctactttgaaggagaaagaaatacagtctattcctcttctggagtatgtgttctctatgagtgcaaggaccagaccatgaaacttgttgagagttcaggctgtccagctttggattgtccagagtctcatcagataaccttgtctcacagctgttgcaaagtttgtaaaggttatgacttttgttctgaaaggcataactgcatggagaattccatctgcagaaatctgaatgacagggctgtttgtagctgtcgagatggttttagggctcttcgagaggataatgcctactgtgaagacatcgatgagtgtgctgaagggcgccattactgtcgtgaaaatacaatgtgtgtcaacaccccgggttcttttatgtgcatctgcaaaactggatacatcagaattgatgattattcatgtacagaacatgatgagtgtatcacaaatcagcacaactgtgatgaaaatgctttatgcttcaacactgttggaggacacaactgtgtttgcaagccgggctatacagggaatggaacgacatgcaaagcattttgcaaagatggctgtaggaatggaggagcctgtattgccgctaatgtgtgtgcctgcccacaaggcttcactggacccagctgtgaaacggacattgatgaatgctctgatggttttgttcaatgtgacagtcgtgctaattgcattaacctgcctggatggtaccactgtgagtgcagagatggctaccatgacaatgggatgttttcaccaagtggagaatcgtgtgaagatattgatgagtgtgggaccgggaggcacagctgtgccaatgataccatttgcttcaatttggatggcggatatgattgtcgatgtcctcatggaaagaattgcacaggggactgcatccatgatggaaaagttaagcacaatggtcagatttgggtgttggaaaatgacaggtgctctgtgtgctcatgtcagaatggattcgttatgtgtcgacggatggtctgtgactgtgagaatcccacagttgatcttttttgctgccctgaatgtgacccaaggcttagtagtcagtgcctccatcaaaatggggaaactttgtataacagtggtgacacctgggtccagaattgtcaacagtgccgctgcttgcaaggggaagttgattgttggcccctgccttgcccagatgtggagtgtgaattcagcattctcccagagaatgagtgctgcccgcgctgtgtcacagacccttgccaggctgacaccatccgcaatgacatcaccaagacttgcctggacgaaatgaatgtggttcgcttcaccgggtcctcttggatcaaacatggcactgagtgtactctctgccagtgcaagaatggccacatctgttgctcagtggatccacagtgccttcaggaactgtgaagttaactgtctcatgggagatttctgttaaaagaatgttctttcattaaaagaccaaaaagaagttaaaacttaaattgggtgatttgtgggcagctaaatgcagctttgttaatagctgagtgaactttcaattatgaaatttgtggagcttgacaaaatcacaaaaggaaaattactggggcaaaattagacctcaagtctgcctctactgtgtctcacatcaccatgtagaagaatgggcgtacagtatataccgtgacatcctgaaccctggatagaaagcctgagcccattggatctgtgaaagcctctagcttcactggtgcagaaaattttcctctagatcagaatcttcaagaatcagttaggttcctcactgcaagaaataaaatgtcaggcagtgaatgaattatattttcagaagtaaagcaaagaagctataacatgttgtgtacagtacactctgaaaagaaatctgaaacaagttattgtaatgataaaaataatgcacaggcatggttacttaatattttctaacaggaaaagtcatccctatttccttgttttactgcacttaatattatttggttgaatttgttcagtataagctcgttcttgtgcaaaattaaataaatatttctcttaccttataaaaaaaaaaaaaaa

SEQ ID NO: 6474 - protein, 816 aa, Homo sapien; identical to SEQ ID NO: 1082

SEQ ID NO: 6475 - DNA, 2304 bp, Homo sapien
ttggagctgccgccgccgggactcccgtcccagcaggacatggatttgattgacatactttggaggcaagatatagatcttggagtaagtcgagaagtatttgacttcagtcagcgacggaaagagtatgagctggaaaaacagaaaaaacttgaaaaggaaagacaagaacaactccaaaaggagcaagagaaagcctttttcactcagttacaactagatgaagagacaggtgaatttctcccaattcagccagcccagcacacccagtcagaaaccagtggatctgccaactactcccaggttgcccacattcccaaatcagatgctttgtactttgatgactgcatgcagcttttggcgcagacattcccgtttgtagatgacaatgaggtttcttcggctacgtttcagtcacttgttcctgatattcccggtcacatcgagagcccagtcttcattgctactaatcaggctcagtcacctgaaacttctgttgctcaggtagcccctgttgatttagacggtatgcaacaggacattgagcaagtttgggaggagctattatccattcctgagttacagtgtcttaatattgaaaatgacaagctggttgagactaccatggttccaagtccagaagccaaactgacagaagttgacaattatcatttttactcatctataccctcaatggaaaaagaagtaggtaactgtagtccacattttcttaatgcttttgaggattccttcagcagcatcctctccacagaagaccccaaccagttgacagtgaactcattaaattcagatgccacagtcaacacagattttggtgatgaattttattctgctttcatagctgagcccagtatcagcaacagcatgccctcacctgctactttaagccattcactctctgaacttctaaatgggcccattgatgtttctgatctatcactttgcaaagctttcaaccaaaaccaccctgaaagcacagcagaattcaatgattctgactccggcatttcactaaacacaagtcccagtgtggcatcaccagaacactcagtggaatcttccagctatggagacacactacttggcctcagtgattctgaagtggaagagctagatagtgcccctggaagtgtcaaacagaatggtcctaaaacaccagtacattcttctggggatatggtacaacccttgtcaccatctcaggggcagagcactcacgtgcatgatgcccaatgtgagaacacaccagagaaagaattgcctgtaagtcctggtcatcggaaaaccccattcacaaaagacaaacattcaagccgcttggaggctcatctcacaagagatgaacttagggcaaaagctctccatatcccattccctgtagaaaaaatcattaacctccctgttgttgacttcaacgaaatgatgtccaaagagcagttcaatgaagctcaacttgcattaattcgggatatacgtaggaggggtaagaataaagtggctgctcagaattgcagaaaaagaaaactggaaaatatagtagaactagagcaagatttagatcatttgaaagatgaaaaagaaaaattgctcaaagaaaaaggagaaaatgacaaaagccttcacctactgaaaaaacaactcagcaccttatatctcgaagttttcagcatgctacgtgatgaagatggaaaaccttattctcctagtgaatactccctgcagcaaacaagagatggcaatgttttccttgttcccaaaagtaagaagccagatgttaagaaaaactagatttaggaggatttgaccttttctgagctagtttttttgtactattatactaaaagctcctactgtgatgtgaaatgctcatactttataagtaattctatgcaaaatcatagccaaaactagtatagaaaataatacgaaactttaaaaagcattggagtgtcagtatgttgaatcagtagtttcactttaactgtaaacaatttcttaggacaccatttgggctagtttctgtgtaagtgtaaatactacaaaaacttatttatactgttcttatgtcatttgttatattcatagatttatatgatgatatgacatctggctaaaaagaaattattgcaaaactaaccacgatgtacttttttataaatactgtatggacaaaaaatggcattttttataattaaattgtttagctctggcaaaaaaaaaaaattttttaagagctggtactaataaaggattattatgactgttaaaaaaaaaaaaaaaaaa

SEQ ID NO: 6476 - protein, 589 aa, Homo sapien
MDLIDILWRQDIDLGVSREVFDFSQRRKEYELEKQKKLEKERQEQLQKEQEKAFFTQLQLDEETGEFLPIQPAQHTQSETSGSANYSQVAHIPKSDALYFDDCMQLLAQTFPFVDDNEVSSATFQSLVPDIPGHIESPVFIATNQAQSPETSVAQVAPVDLDGMQQDIEQVWEELLSIPELQCLNIENDKLVETTMVPSPEAKLTEVDNYHFYSSIPSMEKEVGNCSPHFLNAFEDSFSSILSTEDPNQLTVNSLNSDATVNTDFGDEFYSAFIAEPSISNSMPSPATLSHSLSELLNGPIDVSDLSLCKAFNQNHPESTAEFNDSDSGISLNTSPSVASPEHSVESSSYGDTLLGLSDSEVEELDSAPGSVKQNGPKTPVHSSGDMVQPLSPSQGQSTHVHDAQCENTPEKELPVSPGHRKTPFTKDKHSSRLEAHLTRDELRAKALHIPFPVEKIINLPVVDFNEMMSKEQFNEAQLALIRDIRRRGKNKVAAQNCRKRKLENIVELEQDLDHLKDEKEKLLKEKGENDKSLHLLKKQLSTLYLEVFSMLRDEDGKPYSPSEYSLQQTRDGNVFLVPKSKKPDVKKN

SEQ ID NO: 6477 - DNA, 4426 bp, Homo sapien; identical to SEQ ID NO: 844

SEQ ID NO: 6478 - protein, 790 aa, Homo sapien; identical to SEQ ID NO: 845

SEQ ID NO: 6479 - DNA, 1550 bp, Homo sapien; identical to SEQ ID NO: 567

SEQ ID NO: 6480 - protein, 408 aa, Homo sapien
MPAVEETQITKYLSKYKYVAATKKDVVDVVTSFRSLTYDLQRFVFNDGSSKELFTIQGTIPVVYKNNTYYIPICIWLMDTHPQNAPMCFVKPTPTMQIKVSMYVDHNGKVYLPYLHDWQPHSSDLLSLIQVMIVTFGDHPPVYSKPKEQIAAPYPTNSYMPQPGAPGGSNSFLPYPTAGGAGGSNFPPYPTGSNVGPYPPTPAGPAGGSGYPAYPNFIQPTAGGYPPAAGYNPSNPSSTGTITEEHIKASIISAIDDKLRRRVQEKVNQYQAEIETLNRTKQELLEGSAKIDAIIERLEREHIDMQKNISILKDKEQELEKALEDLESAEAINPDEAVTTTAPLYRQLLNAYADEAATEDAIYYLGEGLRGGVIDLETFLKHVRQLSRKQFILRATMQKCRQKAGLAG

SEQ ID NO: 6481 - DNA, 1032 bp, Homo sapien; identical to SEQ ID NO: 439

SEQ ID NO: 6482 - protein, 303 aa, Homo sapien; identical to SEQ ID NO: 440

SEQ ID NO: 6483 - DNA, 1872 bp, Homo sapien
atggctacagaacatgttaatggaaatggtactgaagagcccatggatactacttctgcagttatccattcagaaaattttcagacattgcttgatgctggtttaccacagaaagttgctgaaaaactagatgaaatttacgttgcagggctagttgcacatagtgatttagatgaaagagctattgaagctttaaaagaattcaatgaagacggtgcattggcagttcttcaacagtttaaagacagtgatctctctcatgttcagaacaaaagtgcctttttatgtggagtcatgaagacttacaggcagagagaaaaacaagggaccaaagtagcagattctagtaaaggaccagatgaggcaaaaattaaggcactcttggaaagaacaggctacacacttgatgtgaccactggacagaggaagtatggaggaccacctccagattccgtttattcaggtcagcagccttctgttggcactgagatatttgtgggaaagatcccaagagatctatttgaggatgaacttgttccattatttgagaaagctggacctatatgggatcttcgtctaatgatggatccactcactggtctcaatagaggttatgcgtttgtcactttttgtacaaaagaagcagctcaggaggctgttaaactgtataataatcatgaaattcgttctggaaaacatattggtgtctgcatctcagttgccaacaataggctttttgtgggctctattcctaagagtaaaaccaaggaacagattcttgaagaatttagcaaagtaacagagggtcttacagacgtcattttataccaccaaccggatgacaagaaaaaaaacaggagcttttgctttcttgaatatgaagatcacaaaacagctgcccaggcaaggcgtaggttaatgagtggtaaagtcaaggtctgggggaatgttggaactgttgaatgggctgatcctatagaagatcctgatcctgaggttatggcaaaggtaaaagtgctgtttgtacgcaaccttgccaatactgtaacagaagagattttagaaaaggcatttagtcagtttgggaaactggaacgagtgaagaagttaaaagattatgcgttcattcattttgatgagcgagatggtgctgtcaaggctatggaagaaatgaatggcaaagacttggagggagaaaatattgaaattgtttttgccaagccaccagatcagaaaaggaaagaaagaaaagctcagaggcaagcagcaaaaaatcaaatgtatgacgattactactattatggtccacctcatatgccccctccaacaagaggtcgagggcgtggaggtagaggtggttatggatatcctccagattattatggatatgaagattattatgattattatggttatgattaccataactatcgtggtggatatgaagatccatactatggttatgaagattttcaagttggagctagaggaaggggtggtagaggagcaaggggtgctgctccatccagaggtcgtggggctgctcctccccgcggtagagccggttattcacagagaggaggtcctggatcagcaagaggcgttcgaggtgcgagaggaggtgcccaacaacaaagaggccgcggggtacgtggtgcgaggggtggccgcggtggaaatgtaggaggaaagcgcaaagctgatgggtacaaccagccagattccaagcggcgccagaccaataatcagaactggggctcccaacccattgctcagcaaccgctccaaggtggtgatcattctggtaactatggttacaaatctgaaaaccaggagttttatcaggatacttttgggcaacagtggaagtag

SEQ ID NO: 6484 - protein, 623 aa, Homo sapien
MATEHVNGNGTEEPMDTTSAVIHSENFQTLLDAGLPQKVAEKLDEIYVAGLVAHSDLDERAIEALKEFNEDGALAVLQQFKDSDLSHVQNKSAFLCGVMKTYRQREKQGTKVADSSKGPDEAKIKALLERTGYTLDVTTGQRKYGGPPPDSVYSGQQPSVGTEIFVGKIPRDLFEDELVPLFEKAGPIWDLRLMMDPLTGLNRGYAFVTFCTKEAAQEAVKLYNNHEIRSGKHIGVCISVANNRLFVGSIPKSKTKEQILEEFSKVTEGLTDVILYHQPDDKKKNRSFCFLEYEDHKTAAQARRRLMSGKVKVWGNVGTVEWADPIEDPDPEVMAKVKVLFVRNLANTVTEEILEKAFSQFGKLERVKKLKDYAFIHFDERDGAVKAMEEMNGKDLEGENIEIVFAKPPDQKRKERKAQRQAAKNQMYDDYYYYGPPHMPPPTRGRGRGGRGGYGYPPDYYGYEDYYDYYGYDYHNYRGGYEDPYYGYEDFQVGARGRGGRGARGAAPSRGRGAAPPRGRAGYSQRGGPGSARGVRGARGGAQQQRGRGVRGARGGRGGNVGGKRKADGYNQPDSKRRQTNNQNWGSQPIAQQPLQGGDHSGNYGYKSENQEFYQDTFGQQWK

SEQ ID NO: 6485 - DNA, 777 bp, Homo sapien; identical to SEQ ID NO: 1700

SEQ ID NO: 6486 - protein, 165 aa, Homo sapien; identical to SEQ ID NO: 1701

SEQ ID NO: 6487 - DNA, 954 bp, Homo sapien
agaagcggcgctcgcgccaagggacgtgtttctgcgctcgcgtggtcatggaggcgctgccgctgctagccgcgacaactccggaccacggccgccaccgaaggctgcttctgctgccgctactgctgttcctgctgccggctggagctgtgcagggctgggagacagaggagaggccccggactcgcgaagaggagtgccacttctacgcgggtggacaagtgtacccgggagaggcatcccgggtatcggtcgccgaccactccctgcacctaagcaaagcgaagatttccaagccagcgccctactgggaaggaacagctgtgatcgatggagaatttaaggagctgaagttaactgattatcgtgggaaatacttggttttcttcttctacccacttgatttcacatttgtgtgtccaactgaaattatcgcttttggcgacagacttgaagaattcagatctataaatactgaagtggtagcatgctctgttgattcacagtttacccatttggcctggattaatacccctcgaagacaaggaggacttgggccaataaggattccacttctttcagatttgacccatcagatctcaaaggactatggtgtatacctagaggactcaggccacactcttagaggtctcttcattattgatgacaaaggaatcctaagacaaattactctgaatgatcttcctgtgggtagatcagtggatgagacactacgtttggttcaagcattccagtacactgacaaacacggagaagtctgccctgctggctggaaacctggtagtgaaacaataatcccagatccagctggaaagctgaagtatttcgataaactgaattgagaaatacttcttcaagttatgatgcttgaaagttctcaataaagttcacggtttcattaccaaaaaaaaaaaaaaaaaaaaaaaaaaaaaa

SEQ ID NO: 6488 - protein, 271 aa, Homo sapien; identical to SEQ ID NO: 616

SEQ ID NO: 6489 - DNA, 1201 bp, Homo sapien
ggggacagcctggactcagagctcaagtctgaactctacctccagacagaatgaagttcatctcgacatctctgcttctcatgctgctggtcagcagcctctctccagtccaaggtgttctggaggtctattacacaagcttgaggtgtagatgtgtccaagagagctcagtctttatccctagacgcttcattgatcgaattcaaatcttgccccgtgggaatggttgtccaagaaaagaaatcatagtctggaagaagaacaagtcaattgtgtgtgtggaccctcaagctgaatggatacaaagaatgatggaagtattgagaaaaagaagttcttcaactctaccagttccagtgtttaagagaaagattccctgatgctgatatttccactaagaacacctgcattcttcccttatccctgctctggattttagttttgtgcttagttaaatcttttccaggaaaaagaacttccccatacaaataagcatgagactatgtaaaaataaccttgcagaagctgatggggcaaactcaagcttcttcactcacagcaccctatatacacttggagtttgcattcttattcatcagggaggaaagtttctttgaaaatagttattcagttataagtaatacaggattattttgattatatacttgttgtttaatgtttaaaatttcttagaaaacaatggaatgagaatttaagcctcaaatttgaacatgtggcttgaattaagaagaaaattatggcatatattaaaagcaggcttctatgaaagactcaaaaagctgcctgggaggcagatggaacttgagcctgtcaagaggcaaaggaatccatgtagtagatatcctctgcttaaaaactcactacggaggagaattaagtcctacttttaaaggatttctttataaaatttactgtctaagattaatagcattcgaagatccccagacttcatagaatactcagggaaagcatttaaagggtgatgtacacatgtatcctttcacacatttgccttgacaaacttctttcactcacatctttttcactgactttttttgtggggggcggggccggggggactctggtatctaattctttaatgattcctataaatctaatgacattcaataaagttgagcaaacattttacaaaaaaaaaaaaaaaaaaaaaaaaaaaaaa

SEQ ID NO: 6490 - protein, 109 aa, Homo sapien; identical to SEQ ID NO: 1575

SEQ ID NO: 6491 - DNA, 1863 bp, Homo sapien; identical to SEQ ID NO: 207

SEQ ID NO: 6492 - protein, 543 aa, Homo sapien; identical to SEQ ID NO: 208

SEQ ID NO: 6493 - DNA, 1983 bp, Homo sapien; identical to SEQ ID NO: 2586

SEQ ID NO: 6494 - protein, 448 aa, Homo sapien; identical to SEQ ID NO: 2587

SEQ ID NO: 6495 - DNA, 2593 bp, Homo sapien; identical to SEQ ID NO: 2097

SEQ ID NO: 6496 - protein, 359 aa, Homo sapien; identical to SEQ ID NO: 2098

SEQ ID NO: 6497 - DNA, 2314 bp, Homo sapien; identical to SEQ ID NO: 1562

SEQ ID NO: 6498 - protein, 579 aa, Homo sapien; identical to SEQ ID NO: 1563

SEQ ID NO: 6499 - DNA, 6835 bp, Homo sapien
cggcggcggctgcggcttagtcggtggcggccggcggcggctgcgggctgagcggcgagtttccgatttaaagctgagctgcgaggaaaatggcggcgggaggatcaaaatacttgctggatggtggactcagagaccaataaaaataaactgcttgaacatcctttgactggttagccagttgctgatgtatattcaagatgagtggattaggagaaaacttggatccactggccagtgattcacgaaaacgcaaattgccatgtgatactccaggacaaggtcttacctgcagtggtgaaaaacggagacgggagcaggaaagtaaatatattgaagaattggctgagctgatatctgccaatcttagtgatattgacaatttcaatgtcaaaccagataaatgtgcgattttaaaggaaacagtaagacagatacgtcaaataaaagagcaaggaaaaactatttccaatgatgatgatgttcaaaaagccgatgtatcttctacagggcagggagttattgataaagactccttaggaccgcttttacttcaggcattggatggtttcctatttgtggtgaatcgagacggaaacattgtatttgtatcagaaaatgtcacacaatacctgcaatataagcaagaggacctggttaacacaagtgtttacaatatcttacatgaagaagacagaaaggattttcttaagaatttaccaaaatctacagttaatggagtttcctggacaaatgagacccaaagacaaaaaagccatacatttaattgccgtatgttgatgaaaacaccacatgatattctggaagacataaacgccagtcctgaaatgcgccagagatatgaaacaatgcagtgctttgccctgtctcagccacgagctatgatggaggaaggggaagatttgcaatcttgtatgatctgtgtggcacgccgcattactacaggagaaagaacatttccatcaaaccctgagagctttattaccagacatgatctttcaggaaaggttgtcaatatagatacaaattcactgagatcctccatgaggcctggctttgaagatataatccgaaggtgtattcagagattttttagtctaaatgatgggcagtcatggtcccagaaacgtcactatcaagaagcttatcttaatggccatgcagaaaccccagtatatcgattctcgttggctgatggaactatagtgactgcacagacaaaaagcaaactcttccgaaatcctgtaacaaatgatcgacatggctttgtctcaacccacttccttcagagagaacagaatggatatagaccaaacccaaatcctgttggacaagggattagaccacctatggctggatgcaacagttcggtaggcggcatgagtatgtcgccaaaccaaggcttacagatgccgagcagcagggcctatggcttggcagaccctagcaccacagggcagatgagtggagctaggtatgggggttccagtaacatagcttcattgacccctgggccaggcatgcaatcaccatcttcctaccagaacaacaactatgggctcaacatgagtagccccccacatgggagtcctggtcttgccccaaaccagcagaatatcatgatttctcctcgtaatcgtgggagtccaaagatagcctcacatcagttttctcctgttgcaggtgtgcactctcccatggcatcttctggcaatactgggaaccacagcttttccagcagctctctcagtgccctgcaagccatcagtgaaggtgtggggacttcccttttatctactctgtcatcaccaggccccaaattggataactctcccaatatgaatattacccaaccaagtaaagtaagcaatcaggattccaagagtcctctgggcttttattgcgaccaaaatccagtggagagttcaatgtgtcagtcaaatagcagagatcacctcagtgacaaagaaagtaaggagagcagtgttgagggggcagagaatcaaaggggtcctttggaaagcaaaggtcataaaaaattactgcagttacttacctgttcttctgatgaccggggtcattcctccttgaccaactcccccctagattcaagttgtaaagaatcttctgttagtgtcaccagcccctctggagtctcctcctctacatctggaggagtatcctctacatccaatatgcatgggtcactgttacaagagaagcaccggattttgcacaagttgctgcagaatgggaattcaccagctgaggtagccaagattactgcagaagccactgggaaagacaccagcagtataacttcttgtggggacggaaatgttgtcaagcaggagcagctaagtcctaagaagaaggagaataatgcacttcttagatacctgctggacagggatgatcctagtgatgcactctctaaagaactacagccccaagtggaaggagtggataataaaatgagtcagtgcaccagctccaccattcctagctcaagtcaagagaaagaccctaaaattaagacagagacaagtgaagagggatctggagacttggataatctagatgctattcttggtgatctgactagttctgacttttacaataattccatatcctcaaatggtagtcatctggggactaagcaacaggtgtttcaaggaactaattctctgggtttgaaaagttcacagtctgtgcagtctattcgtcctccatataaccgagcagtgtctctggatagccctgtttctgttggctcaagtcctccagtaaaaaatatcagtgctttccccatgttaccaaagcaacccatgttgggtgggaatccaagaatgatggatagtcaggaaaattatggctcaagtatgggtgggccaaaccgaaatgtgactgtgactcagactccttcctcaggagactggggcttaccaaactcaaaggccggcagaatggaacctatgaattcaaactccatgggaagaccaggaggagattataatacttctttacccagacctgcactgggtggctctattcccacattgcctcttcggtctaatagcataccaggtgcgagaccagtattgcaacagcagcagcagatgcttcaaatgaggcctggtgaaatccccatgggaatgggggctaatccctatggccaagcagcagcatctaaccaactgggttcctggcccgatggcatgttgtccatggaacaagtttctcatggcactcaaaataggcctcttcttaggaattccctggatgatcttgttgggccaccttccaacctggaaggccagagtgacgaaagagcattattggaccagctgcacactcttctcagcaacacagatgccacaggcctggaagaaattgacagagctttgggcattcctgaacttgtcaatcagggacaggcattagagcccaaacaggatgctttccaaggccaagaagcagcagtaatgatggatcagaaggcaggattatatggacagacatacccagcacaggggcctccaatgcaaggaggctttcatcttcagggacaatcaccatcttttaactctatgatgaatcagatgaaccagcaaggcaattttcctctccaaggaatgcacccacgagccaacatcatgagaccccggacaaacacccccaagcaacttagaatgcagcttcagcagaggctgcagggccagcagtttttgaatcagagccgacaggcacttgaattgaaaatggaaaaccctactgctggtggtgctgcggtgatgaggcctatgatgcagccccagcagggttttcttaatgctcaaatggtcgcccaacgcagcagagagctgctaagtcatcacttccgacaacagagggtggctatgatgatgcagcagcagcagcagcagcaacagcagcagcagcagcagcagcagcagcaacagcaacagcaacagcaacagcagcaacagcagcaaacccaggccttcagcccacctcctaatgtgactgcttcccccagcatggatgggcttttggcaggacccacaatgccacaagctcctccgcaacagtttccatatcaaccaaattatggaatgggacaacaaccagatccagcctttggtcgagtgtctagtcctcccaatgcaatgatgtcgtcaagaatgggtccctcccagaatcccatgatgcaacacccgcaggctgcatccatctatcagtcctcagaaatgaagggctggccatcaggaaatttggccaggaacagctccttttcccagcagcagtttgcccaccaggggaatcctgcagtgtatagtatggtgcacatgaatggcagcagtggtcacatgggacagatgaacatgaaccccatgcccatgtctggcatgcctatgggtcctgatcagaaatactgctgacatctctgcaccaggacctcttaaggaaaccactgtacaaatgacactgcactaggattattgggaaggaatcattgttccaggcatccatcttggaagaaaggaccagctttgagctccatcaagggtattttaagtgatgtcatttgagcaggactggattttaagccgaagggcaatatctacgtgtttttcccccctccttctgctgtgtatcatggtgttcaaaacagaaatgttttttggcattccacctcctagggatataattctggagacatggagtgttactgatcataaaacttttgtgtcacttttttctgccttgctagccaaaatctcttaaatacacgtaggtgggccagagaacattggaagaatcaagagagattagaatatctggtttctctagttgcagtattggacaaagagcatagtcccagccttcaggtgtagtagttctgtgttgaccctttgtccagtggaattggtgattctgaattgtcctttactaatggtgttgagttgctctgtccctattatttgccctaggctttctcctaatgaaggttttcatttgccattcatgtcctgtaatacttcacctccaggaactgtcatggatgtccaaatggctttgcagaaaggaaatgagatgacagtatttaatcgcagcagtagcaaacttttcacatgctaatgtgcagctgagtgcactttatttaaaaagaatggataaatgcaatattcttgaggtcttgagggaatagtgaaacacattcctggtttttgcctacacttacgtgttagacaagaactatgattttttttttaaagtactggtgtcaccctttgcctatatggtagagcaataatgctttttaaaaataaacttctgaaaacccaaggccaggtactgcattctgaatcagaatctcgcagtgtttctgtgaatagatttttttgtaaatatgacctttaagatattgtattatgtaaaatatgtatatacctttttttgtaggtcacaacaactcatttttacagagtttgtgaagctaaatatttaacattgttgatttcagtaagctgtgtggtgaggctaccagtggaagagacatcccttgacttttgtggcctgggggaggggtagtgctccacagcttttccttccccaccccccagccttagatgcctcgctcttttcaatctcttaatctaaatgctttttaaagagattatttgtttagatgtaggcattttaattttttaaaaattcctctaccagaactaagcactttgttaatttggggggaaagaatagatatggggaaataaacttaaaaaaaaatcaggaatttaaaaaaacgagcaatttgaagagaatcttttggattttaagcagtccgaaataatagcaattcatgggctgtgtgtgtgtgtgtatgtgtgtgtgtgtgtgtgtatgtttaattatgttaccttttcatcccctttaggagcgttttcagattttggttgctaagacctgaatcccatattgagatctcgagtagaatccttggtgtggtttctggtgtctgctcagctgtcccctcattctactaatgtgatgctttcattatgtccctgtggattagaatagtgtcagttatttcttaagtaactcagtacccagaacagccagttttactgtgattcagagccacagtctaactgagcaccttttaaacccctccctcttctgccccctaccacttttctgctgttgcctctctttgacacctgttttagtcagttgggaggaagggaaaaatcaagtttaattccctttatctgggttaattcatttggttcaaatagttgacggaattgggtttctgaatgtctgtgaatttcagaggtctctgctagccttggtatcattttctagcaataactgagagccagttaattttaagaatttcacacatttagccaatctttctagatgtctctgaaggtaagatcatttaatatctttgatatgcttacgagtaagtgaatcctgattatttccagacccaccaccagagtggatcttattttcaaagcagtatagacaattatgagtttgccctctttcccctaccaagttcaaaatatatctaagaaagattgtaaatccgaaaacttccattgtagtggcctgtgcttttcagatagtatactctcctgtttggagacagaggaagaaccaggtcagtctgtctctttttcagctcaattgtatctgacccttctttaagttatgtgtgtggggagaaatagaatggtgctcttatctttcttgactttaaaaaaattattaaaaacaaaaaaaaaaaaaaaaa

SEQ ID NO: 6500 - protein, 1420 aa, Homo sapien
MSGLGENLDPLASDSRKRKLPCDTPGQGLTCSGEKRRREQESKYIEELAELISANLSDIDNFNVKPDKCAILKETVRQIRQIKEQGKTISNDDDVQKADVSSTGQGVIDKDSLGPLLLQALDGFLFVVNRDGNIVFVSENVTQYLQYKQEDLVNTSVYNILHEEDRKDFLKNLPKSTVNGVSWTNETQRQKSHTFNCRMLMKTPHDILEDINASPEMRQRYETMQCFALSQPRAMMEEGEDLQSCMICVARRITTGERTFPSNPESFITRHDLSGKVVNIDTNSLRSSMRPGFEDIIRRCIQRFFSLNDGQSWSQKRHYQEAYLNGHAETPVYRFSLADGTIVTAQTKSKLFRNPVTNDRHGFVSTHFLQREQNGYRPNPNPVGQGIRPPMAGCNSSVGGMSMSPNQGLQMPSSRAYGLADPSTTGQMSGARYGGSSNIASLTPGPGMQSPSSYQNNNYGLNMSSPPHGSPGLAPNQQNIMISPRNRGSPKIASHQFSPVAGVHSPMASSGNTGNHSFSSSSLSALQAISEGVGTSLLSTLSSPGPKLDNSPNMNITQPSKVSNQDSKSPLGFYCDQNPVESSMCQSNSRDHLSDKESKESSVEGAENQRGPLESKGHKKLLQLLTCSSDDRGHSSLTNSPLDSSCKESSVSVTSPSGVSSSTSGGVSSTSNMHGSLLQEKHRILHKLLQNGNSPAEVAKITAEATGKDTSSITSCGDGNVVKQEQLSPKKKENNALLRYLLDRDDPSDALSKELQPQVEGVDNKMSQCTSSTIPSSSQEKDPKIKTETSEEGSGDLDNLDAILGDLTSSDFYNNSISSNGSHLGTKQQVFQGTNSLGLKSSQSVQSIRPPYNRAVSLDSPVSVGSSPPVKNISAFPMLPKQPMLGGNPRMMDSQENYGSSMGGPNRNVTVTQTPSSGDWGLPNSKAGRMEPMNSNSMGRPGGDYNTSLPRPALGGSIPTLPLRSNSIPGARPVLQQQQQMLQMRPGEIPMGMGANPYGQAAASNQLGSWPDGMLSMEQVSHGTQNRPLLRNSLDDLVGPPSNLEGQSDERALLDQLHTLLSNTDATGLEEIDRALGIPELVNQGQALEPKQDAFQGQEAAVMMDQKAGLYGQTYPAQGPPMQGGFHLQGQSPSFNSMMNQMNQQGNFPLQGMHPRANIMRPRTNTPKQLRMQLQQRLQGQQFLNQSRQALELKMENPTAGGAAVMRPMMQPQQGFLNAQMVAQRSRELLSHHFRQQRVAMMMQQQQQQQQQQQQQQQQQQQQQQQQQQQQQTQAFSPPPNVTASPSMDGLLAGPTMPQAPPQQFPYQPNYGMGQQPDPAFGRVSSPPNAMMSSRMGPSQNPMMQHPQAASIYQSSEMKGWPSGNLARNSSFSQQQFAHQGNPAVYSMVHMNGSSGHMGQMNMNPMPMSGMPMGPDQKYC

SEQ ID NO: 6501 - DNA, 1953 bp, Homo sapien; identical to SEQ ID NO: 1814

SEQ ID NO: 6502 - protein, 342 aa, Homo sapien; identical to SEQ ID NO: 1815

SEQ ID NO: 6503 - DNA, 2603 bp, Homo sapien
ccacgcgtccgcgctcccctcagctcctgcagtgctaattaagggagggagcagcggggagcttgcagtgaccaagagggtgttgaggctaggaggccacgataaacaggatacgataaaagtccttaaccaagacgcagatgggaagaagcgttagagcgagcagcactcacatctcaagaaccagcctttcaaacagtttccagagatggattatcctactttacttttggctcttcttcatgtatacagagctctatgtgaagaggtgctttggcatacatcagttccctttgccgagaacatgtctctagaatgtgtgtatccatcaatgggcatcttaacacaggtggagtggttcaagatcgggacccagcaggattccatagccattttcagccctactcatggcatggtcataaggaagccctatgctgagagggtttactttttgaattcaacgatggcttccaataacatgactcttttctttcggaatgcctctgaagatgatgttggctactattcctgctctctttacacttacccacagggaacttggcagaaggtgatacaggtggttcagtcagatagttttgaggcagctgtgccatcaaatagccacattgtttcggaacctggaaagaatgtcacactcacttgtcagcctcagatgacgtggcctgtgcaggcagtgaggtgggaaaagatccagccccgtcagatcgacctcttaacttactgcaacttggtccatggcagaaatttcacctccaagttcccaagacaaatagtgagcaactgcagccacggaaggtggagcgtcatcgtcatccccgatgtcacagtctcagactcggggctttaccgctgctacttgcaggccagcgcaggagaaaacgaaaccttcgtgatgagattgactgtagccgagggtaaaaccgataaccaatataccctctttgtggctggagggacagttttattgttgttgtttgttatctcaattaccaccatcattgtcattttccttaacagaaggagaaggagagagagaagagatctatttacagagtcctgggatacacagaaggcacccaataactatagaagtcccatctctaccggtcaacctaccaatcaatccatggatgatacaagagaggatatttatgtcaactatccaaccttctctcgcagaccaaagactagagtttaagcttattcttgacatgagtgcattagtaatgactcttatgtactcatgcatggatctttatgcaatttttttccactacccaaggtctaccttagatactagttgtctgaattgagttactttgataggaaaaatacttcattacctaaaatcatttttcatagaactgtttcagaaaacctgactctaactggtttatatacaaaagaaaacttactgtatcatataacagaatgatccaggggagattaagctttgggcaagggctatttaccagggcttaaatgttgtgtctagaattaagtatgggcataaactggcttctgaatccctttccagagtgttggatccatttccctggtcttggcctcactctcatgcaggctttcctcttgtgttggcaagatggctgccaactcttggcaattcatacatccttgtttctgtctggtagagagtttgcttctcaaatggagcaaacaaatttgattattttttcattgttaaataggcaacatgaccagaaaggatggaatggcttaagtaaactaagggttcacttctagagctgagaagcagggtcaaagcacaatactgggcaattcagagcatggttagaagaggaaaggggagtctcaaagctggagagtttaccaacaaatattgactgcagtgattaaccaagacatttttgttaactaaaaagtgaaatatgggatggattctagaaatggggtatctctgtccatacttctagaatccactctatcagcatagtccagaagaatacctggcagtagaagaaatgaatattcaagaggaagataaatgcgagagggcaatcctttactattctcatatttatttatctctcattctgtatagaattcttgccgccatcccaggtctagccttaggagcaaatgtagtagatagtcgaataataaataacttaatgttttggacatattttgtctacttttgagaattatttttaatatgtaaattctctcaaaagggtcaggcacctagttattattttttaatgattatgtgaaagttgaatataatataccactaaaagtgacagttgaaagtggtggcataggatggtagggtagaaatttgggagggaaaaaagaaattgggagggtacaggcaacaggagaaaggaatcaaaccacagaaaaatacaaagggaaacttctgcttcactattcagacaaagacagccctaatgacatcaccaacagtcaaagcaattagagaccatacctaatattgtttaaattctagatgtaggctaacaatgaaaagtatttgccaaactgaataaaactgtcatggttaccttgaaaaaaaaaaaaaaaaaaaaaaaaaaaaa

SEQ ID NO: 6504 - protein, 336 aa, Homo sapien
MDYPTLLLALLHVYRALCEEVLWHTSVPFAENMSLECVYPSMGILTQVEWFKIGTQQDSIAIFSPTHGMVIRKPYAERVYFLNSTMASNNMTLFFRNASEDDVGYYSCSLYTYPQGTWQKVIQVVQSDSFEAAVPSNSHIVSEPGKNVTLTCQPQMTWPVQAVRWEKIQPRQIDLLTYCNLVHGRNFTSKFPRQIVSNCSHGRWSVIVIPDVTVSDSGLYRCYLQASAGENETFVMRLTVAEGKTDNQYTLFVAGGTVLLLLFVISITTIIVIFLNRRRRRERRDLFTESWDTQKAPNNYRSPISTGQPTNQSMDDTREDIYVNYPTFSRRPKTRV

SEQ ID NO: 6505 - DNA, 1258 bp, Homo sapien
ccgggctctacccagagcaagaccctgatggctgcggtgtttctggtaacgctttatgaatactcgccgcttttctacatcgcggtggtctttacctgcttcatcgtgaccaccggcctggtattgggatggtttggttgggatgttccagtaattctgagaaattcagaagagacccagttcagcacaagagttttcaaaaagcaaatgagacaagtcaagaatccttttggcttagagatcactaatccatcttcagcttcaattacaactggcataaccttgacaacagattgccttgaagatagcctccttacatgctactgggggtgcagtgttcaaaaattatatgaagctctgcagaagcatgtttattgcttcagaataagcactccccaagcattagaagatgctctgtatagtgaatatctctatcaggaacagtattttattaaaaaggatagcaaagaagaaatatattgccagttaccaagagatactaaaattgaagactttggtacagtacccagatctcgctatccattggtagcgctattgaccttagctgatgaggatgaccgggaaatttatgatattatttccatggtgtcagtgattcatattcctgataggacttataaactatcctgcagaatattgtatcaatatttactcttggctcaaggtcaatttcatgatcttaagcaacttttcatgtctgcaaataataatttcactccctccaacaattcctcttcagaagaaaaaaacacagacagaagtttgttggaaaaggtgggactctctgaaagtgaagttgagccatcggaagagaacagcaaggactgtgttgtttgccagaatgggactgtgaactgggtactcttaccatgcagacacacatgcctgtgtgatggctgtgtgaagtattttcagcagtgcccaatgtgcaggcagtttgttcaggaatcttttgcactttgcagtcaaaaagagcaagataaagacaaaccgaagactctttgaagacatcgtaacactgaaaagtacactttctactaaagatgcagaaattgatgatcttggaattcatcataacatggaatctacagtactgaccatcaatgaaaattatattttaacttcatatttgtatggtacttggatgataaaaattaattattcctttctgcttagtgaatgaatactggaatccatctgtgttgatacaataaaaattcattcaactcttgaaaag

SEQ ID NO: 6506 - protein, 332 aa, Homo sapien
MAAVFLVTLYEYSPLFYIAVVFTCFIVTTGLVLGWFGWDVPVILRNSEETQFSTRVFKKQMRQVKNPFGLEITNPSSASITTGITLTTDCLEDSLLTCYWGCSVQKLYEALQKHVYCFRISTPQALEDALYSEYLYQEQYFIKKDSKEEIYCQLPRDTKIEDFGTVPRSRYPLVALLTLADEDDREIYDIISMVSVIHIPDRTYKLSCRILYQYLLLAQGQFHDLKQLFMSANNNFTPSNNSSSEEKNTDRSLLEKVGLSESEVEPSEENSKDCVVCQNGTVNWVLLPCRHTCLCDGCVKYFQQCPMCRQFVQESFALCSQKEQDKDKPKTL

SEQ ID NO: 6507 - DNA, 1052 bp, Homo sapien
tgccaagccctgccatgtagtgcacgcaggacatcaacaaacacagataacaggaaatgatccattccctgtggtcacttattctaaaggccccaaccttcaaagttcaagtagtgatatggatgactccacagaaagggagcagtcacgccttacttcttgccttaagaaaagagaagaaatgaaactgaaggagtgtgtttccatcctcccacggaaggaaagcccctctgtccgatcctccaaagacggaaagctgctggctgcaaccttgctgctggcactgctgtcttgctgcctcacggtggtgtctttctaccaggtggccgccctgcaaggggacctggccagcctccgggcagagctgcagggccaccacgcggagaagctgccagcaggagcaggagcccccaaggccggcctggaggaagctccagctgtcaccgcgggactgaaaatctttgaaccaccagctccaggagaaggcaactccagtcagaacagcagaaataagcgtgccgttcagggtccagaagaaacagtcactcaagactgcttgcaactgattgcagacagtgaaacaccaactatacaaaaaggatcttacacatttgttccatggcttctcagctttaaaaggggaagtgccctagaagaaaaagagaataaaatattggtcaaagaaactggttacttttttatatatggtcaggttttatatactgataagacctacgccatgggacatctaattcagaggaagaaggtccatgtctttggggatgaattgagtctggtgactttgtttcgatgtattcaaaatatgcctgaaacactacccaataattcctgctattcagctggcattgcaaaactggaagaaggagatgaactccaacttgcaataccaagagaaaatgcacaaatatcactggatggagatgtcacattttttggtgcattgaaactgctgtgacctacttacaccatgtctgtagctattttcctccctttctctgtacctctaagaagaaagaatctaactgaaaata

SEQ ID NO: 6508 - protein, 285 aa, Homo sapien; identical to SEQ ID NO: 4300

SEQ ID NO: 6509 - DNA, 1116 bp, Homo sapien
gcgagacccagcctaaagagagcccggagccagcgtgggaggccgctgccgtcgcgcgccttggtttttctgttcctttttttttttttttttttaacttcctgcctatacacacgcagccatcagcccacaaagacatgactaccaacgcgggccccttgcacccatactggcctcagcacctaagactggacaactttgtacctaatgaccgccccacctggcatatactggctggcctcttctctgtcacaggggtcttagtcgtgaccacatggctgttgtcaggtcgtgctgcggttgtcccattggggacttggcggcgactgtccctgtgctggtttgcagtgtgtgggttcattcacctggtgatcgagggctggttcgttctctactacgaagacctgcttggagaccaagccttcttatctcaactctggaaagagtatgccaagggagacagccgatacatcctgggtgacaacttcacagtgtgcatggaaaccatcacagcttgcctgtggggaccactcagcctgtgggtggtgatcgcctttctccgccagcatcccctccgcttcattctacagcttgtggtctctgtgggccagatctatggggatgtgctctacttcctgacagagcaccgcgacggattccagcacggagagctgggccaccctctctacttctggttttactttgtcttcatgaatgccctgtggctggtgctgcctggagtccttgtgcttgatgctgtgaagcacctcactcatgcccagagcacgctggatgccaaggccacaaaagccaagagcaagaagaactgaggagtggtggaccaggctcgaacactggccgaggaggagctctctgcctgccagaagagtctagtcctgctcccacagtttggagggacaaagctaattgatctgtcacactcaggctcatgggcaggcacaagaaggggaataaaggggctgtgtgaaggcactgctgggagccattagaacacagatacaagagaagccaggaggtctatgatggtgacgatttttaaaatcaggaaataaaagatcttgactctaaaaaaaaaaaaaaaaaaaaaaaaaaaaa

SEQ ID NO: 6510 - protein, 230 aa, Homo sapien [sequence omitted]

SEQ ID NO: 6511 - DNA, 962 bp, Homo sapien
  Unsure 878: Unknown base
gaattccgcccagacgcaggcttcttctcgggtcttggtcctgcatcctctctctcccagagcctccgttagggggtgggaaaggactttgccataggtcgctgaggccaccatctgctctcttactggccaagggcgtaaaaagatagtcttcccattagctagagagcaaaccccagaaagcctattggttgcgccgtccgcgggccttggtccgctttgaaggcgggctgcggctgcgagaggagggcgggcgggaggctagctgttgtcgtggttgctcggaggcacgtgtgcagtcccggaagcggcgaggggaaactgctccgcgcgcgcccgcgggaggaggaaccgcccggtcctttagggtccgggcccggccgggccatggattcaatgcctgagcccgcgtcccgctgtcttctgcttcttcccttgctgctgctgctgctgctgctgctgccggccccggagctgggcccgagccaggccggagctgaggagaacgactgggttcgcctgcccagcaaatgcgaagtgtgtaaatatgttgctgtggagctgaagtcagcctttgaggaaaccggcaagaccaaggaggtgattggcacgggctatggcatcctggaccagaaggcctctggagtcaaatacaccaagtcggacttgcggttaatcgaagtcactgagaccatttgcaagaggctcctgattatagcctgcacaaggagaggaccggcagcaatcgatttgccaagggcatgtcagagacctttgagacattacacaacctggtacacaaaggggtcaaggtggtgatggacatcccctatgagctgtggaacgagacttctgcagaggtggctgacctcaagaancagtgtgatgtgctggtggaagagtttgaggaggtgatcgaggactggtacaggaaccaccaggaggaagacctgactgaattc

SEQ ID NO: 6512 - protein, 143 aa, Homo sapien
MDSMPEPASRCLLLLPLLLLLLLLLPAPELGPSQAGAEENDWVRLPSKCEVCKYVAVELKSAFEETGKTKEVIGTGYGILDQKASGVKYTKSDLRLIEVTETICKRLLIIACTRRGPAAIDLPRACQRPLRHYTTWYTKGSRW

SEQ ID NO: 6513 - DNA, 2248 bp, Homo sapien
ctgcatgtgtgtgtctcatagacacttcagatttaccaagcctaaaatggatcttgtccttagtttcatatctcacagttaatgcatcatcatctcacattttcccctttctgtcattagtcttcactttccttaccactccaaacttgttattccttattcccgaattcttgagtttattccctttctgtagtaagtttgtgcatttgtatcagcctctactctaagacagaaataccatcaccttacttctccggtcacaatatttactggcttcctattacttaactgcaggatgaaatttaaaccctaagcgtgatttatgagacccctttattatttctcccttgcctatctctgttgcctcctgtcttaccttttcttcattattctatatggtcccctccccatggcccccacaagtgacacatgactcttagcccatcccacatttggttatgcctttgcccacacagtttcctggggcagcagtgtcttcctttttctccctactcatgcatacaagctacctaataaacacttattccttcttcagagtgccagatgtctattctcaccatcatggattctttggtgcacctttgtgtttctattgtatattttacatattatttgtctcaggacaatgtaattgtttccatctttctcttcactagtataatatctttatgggcagggacttacatttttatttttttttatccccagagtttagtataatatctggtactacgtatttattatttctcaataaatatttgagaaaggaatgaacctttctttggtaatatgagtatttttatttgcaaaaaaaaaaagtaaagtgtggtatgccatatttagtagagatgttaattctgaaatgattattatttaatgtccattgaactactagttttatatgactacttgagaactaagtatagttaacggtattaatcatcagataacattgctgtatgaaccataagattttggtatgttttgcagatcaaggatctggattttgcataactggtaaaatagaagctggttatatccaaactggtgaccgactactggcaatgcctcctaatgaaacttgtaccgtgaaaggaatcactctgcatgatgaacctgtcgactgggcggcagcaggcgatcatgttagtcttactttggttgggatggatatcatcaaaatcaatgttggctgcatattttgtggccccaaagtacccattaaagcttgcactcgtttcagagcccgaatcctcatctttaatattgaaattcctatcactaaaggatttcctgtgctgttacactaccaaactgtcagtgaacccgccgttattaaacgattgattagtgtcttaaacaaaagcacgggtgaagtcacaaagaaaaagcctaagtttttgactaaaggccagaatgcattggtagagctacagacacaaagaccaatagctcttgagctatataaagactttaaagagctggggaggttcatgctacgttacggtggttctacaatagctgctggtgttgtcactgagataaaagaatgatgggtcagaatttctaccacgtttctggatacagtgaaatagctaacctctgtttcaagaatgcagttattaagtcaaaggaacaatgtgcaattgatatgtttttagatgagagagaaaaattaaagctaaaattagctgcaaagaagtattaataatcacctctgcaaaaattctaagttgccaactggcaaagaaagtctaatgttaaaaacaactttgcctttgaaacgttaataaatggatttactttgctaagatttatggcaagtgtcaaaaatagtatctgaagatactgaatcatcatgaaatgaactctacttctggccaaagcacaatgtatttgcagttttctcttttgattcaattatactgcacatgttttaaggaaaagtaacttaattgggtttttcaggcagttgatatttgacctaagctttttttttttttttttttccagttaatgctaagaaaagatttggggaaggttataataaaagtattttgtggtgaccataagaatgtccctccccaaacaagtaaacttgtgaaagtttaatttggaattagtggaagctgttcctttgaaagccaagatattatttaagttgtaaagccagctaataaaatgccttagtttgagcataataaaaaaaaaaaaaaaaaaaaaaaaa

SEQ ID NO: 6514 - protein, 197 aa, Homo sapien
MNHKILVCFADQGSGFCITGKIEAGYIQTGDRLLAMPPNETCTVKGITLHDEPVDWAAAGDHVSLTLVGMDIIKINVGCIFCGPKVPIKACTRFRARILIFNIEIPITKGFPVLLHYQTVSEPAVIKRLISVLNKSTGEVTKKKPKFLTKGQNALVELQTQRPIALELYKDFKELGRFMLRYGGSTIAAGVVTEIKE

SEQ ID NO: 6515 - DNA, 1496 bp, Homo sapien; identical to SEQ ID NO: 1466

SEQ ID NO: 6516 - protein, 439 aa, Homo sapien; identical to SEQ ID NO: 1467

SEQ ID NO: 6517 - DNA, 2525 bp, Homo sapien; identical to SEQ ID NO: 565

SEQ ID NO: 6518 - protein, 733 aa, Homo sapien; identical to SEQ ID NO: 566

SEQ ID NO: 6519 - DNA, 1741 bp, Homo sapien
ttggaacacctggcgagtcctcggtgtcggtggccggcagtcatctcgcggccgttcagaattataaggctgtctgcagagatttgaaaaatggcaacaaatgaaagtgtcagcatctttagttcagcatccttggctgtggaatatgtagattcacttttacctgagaatcctctgcaagaaccatttaaaaatgcttggaactatatgttgaataattatacaaagttccagattgcaacatggggatcccttatagttcatgaagccctttatttcttattctgtttacctggatttttatttcaatttataccttatatgaaaaaatacaaaattcaaaaggataagccagagacatgggaaaaccaatggaagtgtttcaaagttcttctctttaatcacttctgtatccagctgcctttgatttgtggaacctattattttacagagtatttcaatattccttatgattgggaaagaatgccaagatggtattttcttttggcaagatgctttggttgtgcagtcattgaagatacttggcactattttctgcatagactcttacaccacaaaagaatatacaagtatattcataaagttcatcatgagtttcaggctccatttggaatggaagctgaatatgcacatcctttggagactctaattcttggaactggatttttcattggaatcgtgcttttgtgtgatcatgtaattcttctttgggcatgggtgaccattcgtttattagaaactattgatgtccatagtggttatgatattcctctcaaccctttaaatctgatccctttctatgctggttctcggcatcatgatttccaccacatgaacttcattggaaactatgcttcaacatttacatggtgggatcgaatttttggaacagactctcagtataatgcctataatgaaaagaggaagaagtttgagaaaaagactgaataaatatctcacgtaaaccttcctgaaagataaacgttttcctgaattcagaaactagtagctaacattgcttctggagagcagaaataagcatgtcttctggctactaagtgataaaaagaacattaacaacctttaattaccttcctagtgggaactttttctactttacctacaagttctatatatgtagaaatgaataaatatatatttaagtacagttttcatgaggaagttttaaaagaccatgttcctaagcttccaagaaggttttggatactagaagtattaatctatggcttttctcccagtaaaaccataggcctgaagttcacattgggtctttaaatcttttagatatatactggtcatttcagaaaattcttcatagtggtattggccttatatttaactttttttttattttttttttgagacaaagccacactctgtctccttgtctggagtgtggtggcacagtctcagctcactgcaacctctgcctcccagttcaagcaattcttctgcctcagcctcccaagtagctgggattacaggcacccgccaccacgcccagctaatttttgtatttttgtagagatggggtttctcgatgttggccaggctggtctcaaacttctgacctcaagtgatctgcccaccttggcctcccaaagtgctgggattacaggtgtaagccactgcgcccggcctttttaactttaaacatgttttagaattcacctaaagatcaaaatatcatggattgaac

SEQ ID NO: 6520 - protein, 293 aa, Homo sapien; identical to SEQ ID NO: 2173

SEQ ID NO: 6521 - DNA, 3885 bp, Homo sapien
ggcagggtgactggggtcccatgacagctgctgtgaccccagcaccttcctcaggatgtgggggcctggcagagggctgggcccacagttggggctacttcctgtgctgaaggaagtcctcttgccattcctgctgccctgccgctgcctccctgggaacccatgtgtccttgtggcccctctgagcagccccctcctccttcagggcaggaactgctgccacaacctcaggctgggcaccaaacacccgtgcccgccaatgcggcccagcccccggagagtcaggcccacagagcatgcccatgtgggccggcggtgtggggagccctcggcggggcatggcccctgcgtccacagatgacctctttgcccgcaagctgcgccagccagcaaggcccccgctgacaccgcacaccttcgagccgaggccagtccggggcccactcctgcgcagcggcagcgatgcaggcgaggccaggccccccacgccagccagcccccgtgcccgtgcccacagccacgaagaggccagccgacctgcagccacttccacccggctcttcactgacccgctggcactgctggggctgccagcagaggaaccagagcctgccttcccaccagtgcttgagcctcgatggtttgcccactatgacgtgcaaagcctgctctttgattgggctccgaggtctcaggggatggggagccactcagaggccagctctgggaccctggcttcagccgaggaccaggctgccagctcggacctgctgcatggggcacctggctttgtgtgtgagctcgggggtgagggtgagctaggcctgggtggaccagcattcccacctgtgccccctgcactgcccaacgcggccgtgtccatcctggaggagccacagaaccgaacctcggcctacagcctggagcacgcagacctgggtgctggctactaccgcaaatacttctatggcaaagaacatcagaacttcttcgggatggacgagtcgctgggcccggtggcagtgagcctgcggcgggaggagaaggagggcagcggagggggcaccctgcacagctaccgcgtcatcgtgcggaccacgcagctccggacactccgtggcaccatctcggaggacgcgctgccgccggggcccccacggggtctgtccccaaggaaacttctggagcacgtggcgccgcagctgagccccagctgcctgcgcctgggctcagcttcacccaaggtaccacggacgctgctcacactggatgagcaagtgctgagcttccaacgcaaggtgggcatcctgtactgccgggcgggccagggctcggaggaggagatgtacaacaaccaggaggcgggaccggccttcatgcagtttctcaccttgctgggcgatgtggtgcggctcaaaggctttgagagttaccgggcccagctagacaccaaaacggattccacaggcacgcactccctctacaccacataccaggaccacgagatcatgttccacgtgtccacgatgctgccttacacccctaataaccagcagcagctcctccggaagcgccacattggcaacgacattgtgaccatcgtgttccaggagcctggcagcaagcccttctgccccaccaccatccgctcgcacttccagcacgtgttcctagtggtgcgggcacacacaccctgcacgccacacaccacctacagggtggccgtgagccgcacccaggacacccctgccttcgggccagctctgcctgctggcggaggccccttcgcagccaacgccgacttccgggccttcctgctggccaaagcgctgaatggtgagcaggcggccggccacgcgcgccagttccacgccatggccacgcgcacccgccagcagtacctgcaagacctggccaccaacgaggtgaccactacgtcgctggactcggcttcacgcttcggcctgccctccctgggtgggaggcgccgggcggcccctcggggcccaggcgccgagctgcaggcagcgggctcactggtgtggggagtgcgcgcggcgcccggggcgcgggtcgccgccggggctcaggcgagcggccccgaaggcatcgaggtgccctgcctgctgggcatctcggccgaggctctggtgctggtggcgccgcgcgacggccgcgtagtgttcaattgcgcctgtcgcgacgtgctggcctggaccttctccgagcagcagctggacctgtaccacggccgcggggaggcgatcacgctgcgcttcgacgggtcccccggccaagccgtgggcgaggtggtggcgcgcctgcagctggtgagccgtggctgcgagacccgcgagctggcgctgccccgcgacggtcaaggccgcctgggcttcgaggtggacgccgagggattcgtcacgcacgtggagcgcttcacattcgccgagacggcggggctgcggcccggggcgcgcctcctgcgcgtgtgcggccagacgctgcccagcctccggcccgaggccgctgcccagctcctgcgctcggcgcccaaggtctgcgtcaccgtcctgccccccgacgagagcggccggccccgcaggagtttttcggagctgtacacgctgtcgctgcaggagcctagccggcggggggccccagatcctgtgcaggatgaggtccacggggtgaccctgctgcccaccacaaagcagctgctgcacctgtgcctgcaagatggtggcagtcctccagggcctggggatctggccgaggagaggactgagttcctgcacagccagaactcgctgtcaccacgcagctctctgtcggatgaggccccagtcctgcccaacaccaccccggacctcctcctggccaccacagccaagccatcagtacccagtgctgacagtgagacacccctgacccaggacaggccaggcagtcccagtggctgtgaggacaagggcaacccggcgccggagctgagggcgtcttttctgccacgtaccttgtctctgcggaactccatcagcaggatcatgtcggaggcgggcagtgggaccctggaggacgagtggcaggccatctcggagattgcctctacttgcaacaccattctggagtcgctgtcccgagagggacagcccatcccagagagtggagaccctaagggaactccaaaatctgatgctgagccagagcctgggaacctctcagagaaggtctctcacttggagtccatgctcaggaagctgcaggaggacctgcagaaggagaaggcggacagggcggccctggaggaggaggtgcggagcctgagacacaacaaccggcggctgcaggcggagtctgagagtgcagccacacgcctcctcctggcctccaagcagctgggctcacccaccgccgacctggcctgagccgtctggaaccacttgggcccatgagggcactgtggtcacactgggccctcctcaggaactctccctgcggcagaggcgtgtcttagcactgcccccctccctagccccttatttggtggcggaagtggcctccaccccttccctgttagtacaatattctgtggagaaaagaggacttcagggagtaaaaaagccactgatgaaagaagaaaactttagagcacaatggatctcgaggtcgagggatctctagggaattgctgcagcagcttttagagcagaagtgacacttccgtacaggcctagaagtaaaggcaacatccactgaggagcagttctttgatttgcaccaccaccggatcccccgggctgcaggaattcgatatcaagcttatcgataccgtcgacctcgagggggggcccggtacccaattcgccctatagtgagtcgtattac

SEQ ID NO: 6522 - protein, 1042 aa, Homo sapien [sequence omitted]

SEQ ID NO: 6523 - DNA, 2130 bp, Homo sapien
tgaaccgaggcaagggggcgcggcgcacgcagtatggcgcccaacatctacttggttcgccagcggatcagtcgactcggccagaggatgtccggcttccagatcaacctcaacccgctcaaggagccactcggcttcatcaaggtcctcgagtggattgcttctatctttgcttttgccacctgtggaggttttaagggccaaacagaaattcaagtgaattgtcctcctgcagttactgagaataaaactgttacagctacttttggttatccattcaggttgaatgaggcatcatttcagccacctccaggtgtaaacatatgtgatgtaaattggaaagattacgtcctcataggcgattactcttcttctgcacaattctatgttacctttgcagtctttgtgttcctgtactgcattgctgcccttctgctttatgttggctacacgagtctgtatctggatagtcgtaaacttcctatgatagactttgttgttacacttgttgccacttttttgtggttggtgagcacttcagcctgggctaaagctctgacagatattaaaatagctactggtcacaatattattgatgaacttccgccttgtaagaagaaagcagtactgtgttactttggctctgtgaccagtatgggatccctaaatgtatctgtgatatttggctttctaaatatgatactctggggaggaaatgcttggtttgtgtacaaggagaccagcctacacagtccatcaaatacatctgcccctcatagccaaggaggtattccacctcctaccggaatataattaaagggagaaatacactgtatgaagtatatgttgatactatgacatgttgccaacaccttgagaagcattatttgtttctaataaaagtaatggctttgtcaatatattggtgggtttaaaactttgctgcttttttacataaagcctgtgcctttcctagaaagttaagatgtaaatgtattctcacatgtaaatttgaaagttcaggggtctattatgaaatggattacacattttaaatgaacccataatttttttcactaaagctgtttgccctccaaagtgtttacacctaagcctaacatgtatcgctcattcagaaaactgttatattgtcataccatagtaggaagaaaaacctttatttggaatatacactactgtaagtttgtacagatcatatacctaccacctgtctttgcttaaagagccttgattacataaatatgtaggaaaaaacatattgagttcaaaatttatatctaacattgtttatgttatgattttttttaattgcaaagactaggtgtatatttttttctgtttttctaaatgacccgtggtacttaataggtgtactaaaattgtgttgggagcagggatttggaaatttctgagagatgtgtagttaattagtaattctgtttcatgagatatgatctgttatgctagtggtttaataggcttgctatgtaagtagaacgtggctcaactagatatcttatatgtatgggcattacctcttagtgatatttgtttcctgtcctttgttgctcatgctgtttaagtgcaggctgagacccagcctctttgtaagtacagtaaaataatccaccgttttttacagaccctagtcaaagggttaaaaaaattaagattgctttccatgtttgaaatttaccattgagagtcaatgaagttgctattttgagtttagcattgatattgtgaaaataagtgcaatttggatttcatgtttcttaatattcattcttgtttcacaaatgaatgattaaggaattatgcatcataaaggaacctaagtgaggtatatgatgagtgtattgtctttgcacacacatataggtatattctgaatacaagcttattcattttgcttcctaatctttttgttgtacagggattcaggtttcttattcttacaacatgattgtttatatgtgaagcacatcttgctgttgccttatttttgatgcttttattcatgacaagaattgtcaatataagaatgtatatctttgccgcaaccaatttaataaaggagttgaaagaaaaaaaaaaaaaaaaaaaaaa

SEQ ID NO: 6524 - protein, 259 aa, Homo sapien
MAPNIYLVRQRISRLGQRMSGFQINLNPLKEPLGFIKVLEWIASIFAFATCGGFKGQTEIQVNCPPAVTENKTVTATFGYPFRLNEASFQPPPGVNICDVNWKDYVLIGDYSSSAQFYVTFAVFVFLYCIAALLLYVGYTSLYLDSRKLPMIDFVVTLVATFLWLVSTSAWAKALTDIKIATGHNIIDELPPCKKKAVLCYFGSVTSMGSLNVSVIFGFLNMILWGGNAWFVYKETSLHSPSNTSAPHSQGGIPPPTGI

SEQ ID NO: 6525 - DNA, 2187 bp, Homo sapien
cagaggaggggacggcagcaccatggacccccgcttgtccactgtccgccagacctgctgctgcttcaatgtccgcatcgcaaccaccgccctggccatctaccatgtgatcatgagcgtcttgttgttcatcgagcactcagtagaggtggcccatggcaaggcgtcctgcaagctctcccagatgggctacctcaggatcgctgacctgatctccagcttcctgctcatcaccatgctcttcatcatcagcctgagcctactgatcggggtagtcaagaaccgggagaagtacctgctgcccttcctgtccctgcaaatcatggactatctcctgtgcctgctcacactgctgggctcctacattgagctgcccgcctacctcaagttggcctcccggagccgtgctagctcctccaagttccccctgatgacgctgcagctgctggacttctgcctgagcatcctgaccctctgcagctcctacatggaagtgcccacctatctcaacttcaagtccatgaaccacatgaattacctccccagccaggaggatatgcctcataaccagttcatcaagatgatgatcatcttttccatcgccttcatcactgtccttatcttcaaggtctacatgttcaagtgcgtgtggcggtgctacagattgatcaagtgcatgaactcggtggaggagaagagaaactccaagatgctccagaaggtggtcctgccgtcctacgaggaagccctgtctttgccatcgaaggacccagagggggggccagcaccacccccatactcagaggtgtgaccctcggcagggcccaggcccagtgttgggaggggtggagctgcctcataatctgcttttttggtttggtggcccctgtggcctgggtgggccctcccgcccctccctggcaggacaatctgcttgtgtctccctcgctggcctgctcctcctgcaggggctgtgagctgctcacaactgggtcaacgctttaggctgagtcactcctcgggtctctccataattcagcccaacaatgtttggtttatttcaatcagctctgacacttgtttagacgattgggcattctaaagttggtgagtttgtcaagcaactatcgacttgatcagttcagcaagcaactgacaaatcaaaaacccacttgtcagttcaataaaataatttgggcaaacaacagactattggattgatttataaataggtggcagttcacataggaatttaatcaagtaatcattaattagttaccccctatatataaatatatgtaatcaatttcttcaaatagcttggttacatgataatcaattagccaaccatgagtcatttagaatagtgataaatagaatacacagaatagtgatgaaattcaatttaaaaaatcacgttagcctccaaaccatttaattcaaatgaacccatcaactggatgccaactctggcgaatgtaggacctctgagtgggtgtataattgttaattcaaatgaaattcatttaaacagttgacaaactgtcattcaacaattaggtccaggaaataacagttatttcatcataaaacagtcccttcaaacacacaattggtctgctgaagggttgtcatcaacaatccaatgctcacctattcagttgctctgtggtcagtgtggctgcataacagtggattccatgaaaggagtcattttagtgatgagctgccagtccattcccaggccaggctgtcgctggccatccattcagtcgattcagtcataggcgaatctgttctgcccgaggcttgtggtcaagcaaaaattcagccctgaaatcaggcacatctgttcggtggactaaacccacaggttagttcagtcaaagcagggaacccccttgtgggcactgaccctgccactggggtcatggcggttgtgacagctggggaggtttgcccccaacagccctcctgtgcctgcttccctgtgtgtcggggtcctccagggagctgacccagaggtggaggccacggaggcagggtctctggggactgtcggggggtacagagggagaaggctcttcaagagctccctggcaatacccccttgtgtaattgctttgtgtgcgacagggaggaagtttcaataaagcagcaacaagcttccaaaaaaaaaaaaaaaaa

SEQ ID NO: 6526 - protein, 262 aa, Homo sapien [sequence omitted]

SEQ ID NO: 6527 - DNA, 2697 bp, Homo sapien
acgcgggcacgcacacacggaagcacgcctccacttaactcgcgccgccgcggcagctcgagtccaccagcagcgccgtccgcttgaccgagatgctgcgggcctgtcagttatcgggtgtgaccgccgccgcccagagttgtctctgtgggaagtttgtcctccgtccattgcgaccatgccgcagatactctacttcaggcagctctgggttgactactggcaaaattgctggagctggccttttgtttgttggtggaggtattggtggcactatcctatatgccaaatgggattcccatttccgggaaagtgtagagaaaaccataccttactcagacaaactcttcgagatggttcttggtcctgcagcttataatgttccattgccaaagaaatcgattcagtcgggtccactaaaaatctctagtgtatcagaagtaatgaaagaatctaaacagtctgcctcacaactccaaaaacaaaagggagatactccagcttcagcaacagcacctacagaagcggctcaaattatttctgcagcaggtgataccctgtcggtcccagcccctgcagttcagcctgaggaatctttaaaaactgatcaccctgaaattggtgaaggaaaacccacacctgcactttcagaagaagcatcctcatcttctataagggagcgaccacctgaagaagttgcagctcgccttgcacaacaggaaaaacaagaacaagttaaaattgagtctctagccaagagcttagaagatgctctgaggcaaactgcaagtgtcactctgcaggctattgcagctcagaatgctgcggtccaggctgtcaatgcacactccaacatattgaaagccgccatggacaattctgagattgcaggcgagaagaaatctgctcagtggcgcacagtggagggtgcattgaaggaacgcagaaaggcagtagatgaagctgccgatgcccttctcaaagccaaagaagagttagagaagatgaaaagtgtgattgaaaatgcaaagaaaaaagaggttgctggggccaagcctcatataactgctgcagagggtaaacttcacaacatgatagttgatctggataatgtggtcaaaaaggtccaagcagctcagtctgaggctaaggttgtatctcagtatcatgagctggtggtccaagctcgggatgactttaaacgagagctggacagtattactccagaagtccttcctggatggaaaggaatgagtgtttcagacttagctgacaagctctctactgatgatctgaactccctcattgctcatgcacatcgtcgtattgatcagctgaacagagagctggcagaacagaaggccaccgaaaagcagcacatcacgttagccttggagaaacaaaagctggaagaaaagcgggcatttgactctgcagtagcaaaagcattagaacatcacagaagtgaaatacaggctgaacaggacagaaagatagaagaagtcagagatgccatggaaaatgaaatgagaacccagcttcgccgacaggcagctgcccacactgatcacttgcgagatgtccttagggtacaagaacaggaattgaagtctgaatttgagcagaacctgtctgagaaactctctgaacaagaattacaatttcgtcgtctcagtcaagagcaagttgacaactttactctggatataaatactgcctatgccagactcagaggaatcgaacaggctgttcagagccatgcagttgctgaagaggaagccagaaaagcccaccaactctggctttcagtggaggcattaaagtacagcatgaagacctcatctgcagaaacacctactatcccgctgggtagtgcagttgaggccatcaaagccaactgttctgataatgaattcacccaagctttaaccgcagctatccctccagagtccctgacccgtggggtgtacagtgaagagacccttagagcccgtttctatgctgttcaaaaactggcccgaagggtagcaatgattgatgaaaccagaaatagcttgtaccagtacttcctctcctacctacagtccctgctcctattcccacctcagcaactgaagccgcccccagagctctgccctgaggatataaacacatttaaattactgtcatatgcttcctattgcattgagcatggtgatctggagctagcagcaaagtttgtcaatcagctgaagggggaatccagacgagtggcacaggactggctgaaggaagcccgaatgaccctagaaacgaaacagatagtggaaatcctgacagcatatgccagcgccgtaggaataggaaccactcaggtgcagccagagtgaggtttaggaagattttcataaagtcatatttcatgtcaaaggaaatcagcagtgatagatgaagggttcgcagcgagagtcccggacttgtctagaaatgagcaggtttacaagtactgttctaaatgttaacacctgttgcatttatattctttccatttgctatcatgtcagtgaacgccaggagtgctttctttgcaacttgtgtaacattttctgttttttcaggttttactgatgaggcttgtgaggccaatcaaaataatgtttgtgatctctactactgttgattttgccctcggagcaaactgaataaagcaacaagatg

SEQ ID NO: 6528 - protein, 758 aa, Homo sapien
MLRACQLSGVTAAAQSCLCGKFVLRPLRPCRRYSTSGSSGLTTGKIAGAGLLFVGGGIGGTILYAKWDSHFRESVEKTIPYSDKLFEMVLGPAAYNVPLPKKSIQSGPLKISSVSEVMKESKQSASQLQKQKGDTPASATAPTEAAQIISAAGDTLSVPAPAVQPEESLKTDHPEIGEGKPTPALSEEASSSSIRERPPEEVAARLAQQEKQEQVKIESLAKSLEDALRQTASVTLQAIAAQNAAVQAVNAHSNILKAAMDNSEIAGEKKSAQWRTVEGALKERRKAVDEAADALLKAKEELEKMKSVIENAKKKEVAGAKPHITAAEGKLHNMIVDLDNVVKKVQAAQSEAKVVSQYHELVVQARDDFKRELDSITPEVLPGWKGMSVSDLADKLSTDDLNSLIAHAHRRIDQLNRELAEQKATEKQHITLALEKQKLEEKRAFDSAVAKALEHHRSEIQAEQDRKIEEVRDAMENEMRTQLRRQAAAHTDHLRDVLRVQEQELKSEFEQNLSEKLSEQELQFRRLSQEQVDNFTLDINTAYARLRGIEQAVQSHAVAEEEARKAHQLWLSVEALKYSMKTSSAETPTIPLGSAVEAIKANCSDNEFTQALTAAIPPESLTRGVYSEETLRARFYAVQKLARRVAMIDETRNSLYQYFLSYLQSLLLFPPQQLKPPPELCPEDINTFKLLSYASYCIEHGDLELAAKFVNQLKGESRRVAQDWLKEARMTLETKQIVEILTAYASAVGIGTTQVQPE

SEQ ID NO: 6529 - DNA, 1061 bp, Homo sapien; identical to SEQ ID NO: 1304

SEQ ID NO: 6530 - protein, 266 aa, Homo sapien; identical to SEQ ID NO: 1305

SEQ ID NO: 6531 - DNA, 1501 bp, Homo sapien
atgacccccatcctcacggtcctgatctgtctcgggctgagtctgggccccaggacccacgtgcaggcagggcacctccccaagcccaccctctgggctgagccaggctctgtgatcatccagggaagtcctgtgaccctcaggtgtcaggggagccttcaggctgaggagtaccatctatatagggaaaacaaatcagcatcctgggttagacggatacaagagcctgggaagaatggccagttccccatcccatccatcacctgggaacacgcagggcggtatcactgtcagtactacagccacaatcactcatcagagtacagtgaccccctggagctggtggtgacaggagcctacagcaaacccaccctctcagctctgcccagccctgtggtgaccttaggagggaacgtgaccctccagtgtgtctcacaggtggcatttgacggcttcattctgtgtaaggaaggagaagatgaacacccacaacgcctgaactcccattcccatgcccgtgggtggtcctgggccatcttctccgtgggccccgtgagcccgagtcgcaggtggtcgtacaggtgctatgcttatgactcgaactctccctatgtgtggtctctacccagtgatctcctggagctcctggtcccaggtgtttctaagaagccatcactctcagtgcagccaggtcctatggtggcccctggggagagcctgaccctccagtgtgtctctgatgtcggctacgacagatttgttctgtataaggagggagaacgtgacttcctccagcgccctggttggcagccccaggctgggctctcccaggccaacttcaccctgggccctgtgagcccctcccacgggggccagtacagatgctacagtgcacacaacctctcctccgagtggtcggcccccagtgaccccctggacatcctgatcacaggacagttctatgacagaccctctctctcggtgcagccggtccccacagtagccccaggaaagaacgtgaccctgctgtgtcagtcacgggggcagttccacactttccttctgaccaaggagggggcaggccatcccccactgcatctgagatcagagcaccaagctcagcagaaccaggctgaattccgcatgggtcctgtgacctcagcccacgtggggacctacagatgctacagctcactcagctccaacccctacctgctgtctctccccagtgaccccctggagctcgtggtctcagaagcagctgagaccctcagcccatcacaaaacaagacagactccacgactacatccctaggccaacacccccaggattacacagtggagaatctcatccgcatgggtgtggctggcttggtcctggtggtcctcgggattctgctatttgaggctcagcacagccagagaagcctacaagatgcagccgggaggtgaacagcagagaggacaatgcatacttcagcgtggtggagcctcagggaca

SEQ ID NO: 6532 - protein, 483 aa, Homo sapien
MTPILTVLICLGLSLGPRTHVQAGHLPKPTLWAEPGSVIIQGSPVTLRCQGSLQAEEYHLYRENKSASWVRRIQEPGKNGQFPIPSITWEHAGRYHCQYYSHNHSSEYSDPLELVVTGAYSKPTLSALPSPVVTLGGNVTLQCVSQVAFDGFILCKEGEDEHPQRLNSHSHARGWSWAIFSVGPVSPSRRWSYRCYAYDSNSPYVWSLPSDLLELLVPGVSKKPSLSVQPGPMVAPGESLTLQCVSDVGYDRFVLYKEGERDFLQRPGWQPQAGLSQANFTLGPVSPSHGGQYRCYSAHNLSSEWSAPSDPLDILITGQFYDRPSLSVQPVPTVAPGKNVTLLCQSRGQFHTFLLTKEGAGHPPLHLRSEHQAQQNQAEFRMGPVTSAHVGTYRCYSSLSSNPYLLSLPSDPLELVVSEAAETLSPSQNKTDSTTTSLGQHPQDYTVENLIRMGVAGLVLVVLGILLFEAQHSQRSLQDAAGR

SEQ ID NO: 6533 - DNA, 2088 bp, Homo sapien
gaattcggcacgagcgcgcggcgaatctcaacgctgcgccgtctgcgggcgcttccgggccaccagtttctctgctttccaccctggcgccccccagccctggctccccagctgcgctgccccgggcgtccacgccctgcgggcttagcgggttcagtgggctcaatctgcgcagcgccacctccatgttgaccaagcctctacaggggcctcccgcgccccccgggacccccacgccgccgccaggaggcaaggatcgggaagcgttcgaggccgagtatcgactcggccccctcctgggtaaggggggctttggcaccgtcttcgcaggacaccgcctcacagatcgactccaggtggccatcaaagtgattccccggaatcgtgtgctgggctggtcccccttgtcagactcagtcacatgcccactcgaagtcgcactgctatggaaagtgggtgcaggtggtgggcaccctggcgtgatccgcctgcttgactggtttgagacacaggaaggcttcatgctggtcctcgagcggcctttgcccgcccaggatctctttgactatatcacagagaagggcccactgggtgaaggcccaagccgctgcttctttggccaagtagtggcagccatccagcactgccattcccgtggagttgtccatcgtgacatcaaggatgagaacatcctgatagacctacgccgtggctgtgccaaactcattgattttggttctggtgccctgcttcatgatgaaccctacactgactttgatgggacaagggtgtacagccccccagagtggatctctcgacaccagtaccatgcactcccggccactgtctggtcactgggcatcctcctctatgacatggtgtgtggggacattccctttgagagggaccaggagattctggaagctgagctccacttcccagcccatgtctccccagactgctgtgccctaatccgccggtgcctggcccccaaaccttcttcccgaccctcactggaagagatcctgctggacccctggatgcaaacaccagccgaggatgttacccctcaacccctccaaaggaggccctgcccctttggcctggtccttgctaccctaagcctggcctggcctggcctggcccccaatggtcagaagagccatcccatggccatgtcacagggatagatggacatttgttgacttggttttacaggtcattaccagtcattaaagtccagtattactaaggtaagggattgaggatcaggggttagaagacataaaccaagtttgcccagttcccttcccaatcctacaaaggagccttcctcccagaacctgtggtccctgattttggagggggaacttcttgcttctcattttgctaaggaagtttattttggtgaagttgttcccattttgagccccgggactcttattttgatgatgtgtcaccccacattggcacctcctactaccaccacacaaacttagttcatatgcttttacttgggcaagggtgctttccttccaataccccagtagcttttattttagtaaagggaccctttcccctagcctagggtcccatattgggtcaagctgcttacctgcctcagcccaggattttttattttgggggaggtaatgccctgttgttaccccaaggcttctttttttttttttttttttttgggtgaggggaccctactttgttatcccaagtgctcttattctggtgagaagaaccttaattccataatttgggaaggaatggaagatggacaccaccggacaccaccagacaataggatgggatggatggttttttgggggatgggctaggggaaataaggcttgctgtttgttttcctggggcgctccctccaattttgcagatttttgcaacctcctcctgagccgggattgtccaattactaaaatgtaaataatcacgtattgtggggaggggagttccaagtgtgccctccttttttttcctgcctggattatttaaaaagccatgtgtggaaacccactatttaataaaagtaatagaatcagaaaaaaaaaaaaaaaaaaa

SEQ ID NO: 6534 - protein, 334 aa, Homo sapien
MLTKPLQGPPAPPGTPTPPPGGKDREAFEAEYRLGPLLGKGGFGTVFAGHRLTDRLQVAIKVIPRNRVLGWSPLSDSVTCPLEVALLWKVGAGGGHPGVIRLLDWFETQEGFMLVLERPLPAQDLFDYITEKGPLGEGPSRCFFGQVVAAIQHCHSRGVVHRDIKDENILIDLRRGCAKLIDFGSGALLHDEPYTDFDGTRVYSPPEWISRHQYHALPATVWSLGILLYDMVCGDIPFERDQEILEAELHFPAHVSPDCCALIRRCLAPKPSSRPSLEEILLDPWMQTPAEDVTPQPLQRRPCPFGLVLATLSLAWPGLAPNGQKSHPMAMSQG

SEQ ID NO: 6535 - DNA, 1658 bp, Homo sapien; identical to SEQ ID NO: 1242

SEQ ID NO: 6536 - protein, 277 aa, Homo sapien; identical to SEQ ID NO: 1243

SEQ ID NO: 6537 - DNA, 1414 bp, Homo sapien
gaattcgcactgctctgagaatttgtgagcagcccctaacaggctgttacttcactacaactgacgatatgatcatcttaatttacttatttctcttgctatgggaagacactcaaggatggggattcaaggatggaatttttcataactccatatggcttgaacgagcagccggtgtgtaccacagagaagcacggtctggcaaatacaagctcacctacgcagaagctaaggcggtgtgtgaatttgaaggcggccatctcgcaacttacaagcagctagaggcagccagaaaaattggatttcatgtctgtgctgctggatggatggctaagggcagagttggataccccattgtgaagccagggcccaactgatgatttggaaaaactggcattattgattatggaatccgtctcaataggagtgaaagatgggatgcctattgctacaacccacacgcaaaggagtgtggtggcgtctttacagatccaaagcgaatttttaaatctccaggcttcccaaatgagtacgaagataaccaaatctgctactggcacattagactcaagtatggtcagcgtattcacctgagttttttagattttgaccttgaagatgacccaggttgcttggctgattatgttgaaatatatgacagttacgatgatgtccatggctttgtgggaagatactgtggagatgagcttccagatgacatcatcagtacaggaaatgtcatgaccttgaagtttctaagtgatgcttcagtgacagctggaggtttccaaatcaaatatgttgcaatggatcctgtatccaaatccagtcaaggaaaaaatacaagtactacttctactggaaataaaaactttttagctggaagatttagccacttataaaaaaaaaaaaggatgatcaaaacacacagtgtttatgttggaatcttttggaactcctttgatctcactgttattattaacatttatttattatttttctaaatgtgaaagaaatacataatttagggaaaattggaaaatataggaaactttaaacgagaaaatgaaacctctcataatcccactgcatagaaataacaagcgttaacattttcatatttttttctttcagtcatttttgtatttgtggtatatgtatatatgtacctatatgtatttgcatttgaaattttggaatcctgctctatgtacagttttgtattatactttttaaatcttgaactttatgaacattttctgaaatcattgattattctacaaaaacatgattttaaacagctgtaaaatattctatgatatgaatgttttatgcattatttaagcctgtctctattgttggaatttcaggtcattttcataaatattgttgcaataaatatccttcggaattc

SEQ ID NO: 6538 - protein, 277 aa, Homo sapien
  unsure 103: unknown amino acid
  unsure 104: unknown amino acid
MIILIYLFLLLWEDTQGWGFKDGIFHNSIWLERAAGVYHREARSGKYKLTYAEAKAVCEFEGGHLATYKQLEAARKIGFHVCAAGWMAKGRVGYPIVKPGPNXXFGKTGIIDYGIRLNRSERWDAYCYNPHAKECGGVFTDPKRIFKSPGFPNEYEDNQICYWHIRLKYGQRIHLSFLDFDLEDDPGCLADYVEIYDSYDDVHGFVGRYCGDELPDDIISTGNVMTLKFLSDASVTAGGFQIKYVAMDPVSKSSQGKNTSTTSTGNKNFLAGRFSHL

SEQ ID NO: 6539 - DNA, 1634 bp, Homo sapien
ggtggcgtggggactccctgaaagcagagcggcagggcgcccggaagtcgtgagtcgagtcttcccgggctaatccatgccgggttggaggctgctgacgcaggtcggcgcccaggtgctgggtcgactcggggacggcctgggtgctgccctgggcccggggaacagaacacacatctggctttttgttagaggtcttcatggaaagagtggtacatggtgggatgagcatctttctgaagaaaatgtcccattcattaagcagttggtctctgatgaagataaagcccaattagcaagtaaactgtgtcctctgaaagatgaaccatggcctatacatccttgggaaccaggttcctttagagttggtcttattgccttgaagctgggcatgatgcctttatggaccaaggatggtcaaaagcatgtggtcacattacttcaggtacaagactgtcatgtcttaaaatatacgtcaaaggaaaactgtaatggaaaaatggcaaccctgtctgtaggaggaaaaactgtatcacgttttcgtaaagctacatccatattggaattttaccgggaacttggattgccgccgaaacagacagttaaaatctttaatataacagataatgctgcaattaaaccaggcactcctctttatgctgctcactttcgtccaggacagtatgtggatgtcacagccaaaactattggtaaaggttttcaaggtgtcatgaaaagatggggatttaaaggccagcctgctacgcatggtcaaacgaaaacccacaggagacctggagctgttgcaactggtgatattggcagagtctggcctggaactaaaatgcctggaaaaatgggaaacatatacaggacagaatatggactgaaagtgtggagaataaacacaaagcacaacataatctatgtaaatggctctgtacctggacataaaaattgcttagtaaaggtcaaagattctaaactgcctgcatataaggatctcggtaaaaatctaccattccctacatattttcctgatggagatgaagaggaactgccagaagatttgtatgatgaaaacgtgtgtcagcccggtgcgccttctattacatttgcctaacatctttggacgtggcagaaccttacatattctgtgagcttcgatgagccagagtgatatcataaccaccagaaatcatactctcctttcttagtcacaacaaaatcacacatgtcatctttgtcaagggcataaatatatcattcatacccccattaaattttgttagaaaaattaccacattaaatatatgagttaagtagattggatttgctgaaattggtgttgggcatattagcaaaatattcttaatttgtggactcgattcttttttactacatatttcccaagttatcttaagatgtctgtaaatttaacttttattaaagttttgtcaatctttgtgaaatagtggttgtggaacagtagaaaaccatatggggactatagtgcaacctatttgggtaaagaaaccatttgctaaaatggagaaagtaaatagatttttatttaaattacagaaacatgttaaaggccggacaaaggaaagacaataaaatcataaattatc

SEQ ID NO: 6540 - protein, 348 aa, Homo sapien [sequence omitted]

SEQ ID NO: 6541 - DNA, 2481 bp, Homo sapien; identical to SEQ ID NO: 2259

SEQ ID NO: 6542 - protein, 664 aa, Homo sapien; identical to SEQ ID NO: 2260

SEQ ID NO: 6543 - DNA, 2280 bp, Homo sapien
atggatttatctgctcttcgcgttgaagaagtacaaaatgtcattaatgctatgcagaaaatcttagagtgtcccatctgtctggagttgatcaaggaacctgtctccacaaagtgtgaccacatattttgcaaattttgcatgctgaaacttctcaaccagaagaaagggccttcacagtgtcctttatgtaagaatgatataaccaaaaggagcctacaagaaagtacgagatttagtcaacttgttgaagagctattgaaaatcatttgtgcttttcagcttgacacaggtttggagtatgcaaacagctataattttgcaaaaaaggaaaataactctcctgaacatctaaaagatgaagtttctatcatccaaagtatgggctacagaaaccgtgccaaaagacttctacagagtgaacccgaaaatccttccttgcaggaaaccagtctcagtgtccaactctctaaccttggaactgtgagaactctgaggacaaagcagcggatacaacctcaaaagacgtctgtctacattgaattgggatctgattcttctgaagataccgttaataaggcaacttattgcagtgtgggagatcaagaattgttacaaatcacccctcaaggaaccagggatgaaatcagtttggattctgcaaaaaaggctgcttgtgaattttctgagacggatgtaacaaatactgaacatcgtcaacccagtaataatgatttgaacaccactgagaagcgtgtagctgagaggcatccagaaaagtatcagggtgaagcagcatctgggtgtgagagtgaaacaagcgtctctgaagactgctcagggctatcctctcagagtgacattttaaccactcagcagagggataccatgcaacataacctgataaagctccagcaggaaatggctgaactagaagctgtgttagaacagcatgggagccagcctcctaacagctacccttccatcataagtgactcctctgcccttgaggacctgcgaaatccagaacaaagcacatcagaaaaagtattaacttcacagaaaagtagtgaataccctataagccagaatccagaaggcctttctgctgacaagtttgaggtgtctgcagatagttctaccagtaaaaataaagaaccaggagtggaaaggtcatccccttctaaatgcccatcattagatgataggtggtacatgcacagttgctctgggagtcttcagaatagaaactacccatctcaagaggagctcattaaggttgttgatgtggaggagcaacagctggaagagtctgggccacacgatttgacggaaacatcttacttgccaaggcaagatctagagggaaccccttacctggaatctggaatcagcctcttctctgatgaccctgaatctgatccttctgaagacagagccccagagtcagctcgtgttggcaacataccatcttcaacctctgcattgaaagttccccaattgaaagttgcagaatctgcccagggtccagctgctgctcatactactgatactgctgggtataatgcaatggaagaaagtgtgagcagggagaagccagaattgacagcttcaacagaaagggtcaacaaaagaatgtccatggtggtgtctggcctgaccccagaagaatttatgctcgtgtacaagtttgccagaaaacaccacatcactttaactaatctaattactgaagagactactcatgttgttatgaaaacagatgctgagtttgtgtgtgaacggacactgaaatattttctaggaattgcgggaggaaaatgggtagttagctatttctgggtgacccagtctattaaagaaagaaaaatgctgaatgagcatgattttgaagtcagaggagatgtggtcaatggaagaaaccaccaaggtccaaagcgagcaagagaatcccaggacagaaagatcttcagggggctagaaatctgttgctatgggcccttcaccaacatgcccacagatcaactggaatggatggtacagctgtgtggtgcttctgtggtgaaggagctttcatcattcacccttggcacaggtgtccacccaattgtggttgtgcagccagatgcctggacagaggacaatggcttccatgcaattgggcagatgtgtgaggcacctgtggtgacccgagagtgggtgttggacagtgtagcactctaccagtgccaggagctggacacctacctgataccccagatcccccacagccactactga

SEQ ID NO: 6544 - protein, 759 aa, Homo sapien
MDLSALRVEEVQNVINAMQKILECPICLELIKEPVSTKCDHIFCKFCMLKLLNQKKGPSQCPLCKNDITKRSLQESTRFSQLVEELLKIICAFQLDTGLEYANSYNFAKKENNSPEHLKDEVSIIQSMGYRNRAKRLLQSEPENPSLQETSLSVQLSNLGTVRTLRTKQRIQPQKTSVYIELGSDSSEDTVNKATYCSVGDQELLQITPQGTRDEISLDSAKKAACEFSETDVTNTEHRQPSNNDLNTTEKRVAERHPEKYQGEAASGCESETSVSEDCSGLSSQSDILTTQQRDTMQHNLIKLQQEMAELEAVLEQHGSQPPNSYPSIISDSSALEDLRNPEQSTSEKVLTSQKSSEYPISQNPEGLSADKFEVSADSSTSKNKEPGVERSSPSKCPSLDDRWYMHSCSGSLQNRNYPSQEELIKVVDVEEQQLEESGPHDLTETSYLPRQDLEGTPYLESGISLFSDDPESDPSEDRAPESARVGNIPSSTSALKVPQLKVAESAQGPAAAHTTDTAGYNAMEESVSREKPELTASTERVNKRMSMVVSGLTPEEFMLVYKFARKHHITLTNLITEETTHVVMKTDAEFVCERTLKYFLGIAGGKWVVSYFWVTQSIKERKMLNEHDFEVRGDVVNGRNHQGPKRARESQDRKIFRGLEICCYGPFTNMPTDQLEWMVQLCGASVVKELSSFTLGTGVHPIVVVQPDAWTEDNGFHAIGQMCEAPVVTREWVLDSVALYQCQELDTYLIPQIPHSHY

SEQ ID NO: 6545 - DNA, 3072 bp, Homo sapien
tcagacctgtaggcctgatagactgattaaaccacagaaggtgacctgctgagaaaagtggtacaaatactgggaaaaacctgctcttctgcgttaagtgggagacaatgtcacaagttaaaagctcttattcctatgatgccccctcggatttcatcaatttttcatccttggatgatgaaggagatactcaaaacatagattcatggtttgaggagaaggccaatttggagaataagttactggggaagaatggaactggagggctttttcagggcaaaactcctttgagaaaggctaatcttcagcaagctattgtcacacctttgaaaccagttgacaacacttactacaaagaggcagaaaaagaaaatcttgtggaacaatccattccgtcaaatgcttgttcttccctggaagttgaggcagccatatcaagaaaaactccagcccagcctcagagaagatctcttaggctttctgctcagaaggatttggaacagaaagaaaagcatcatgtaaaaatgaaagccaagagatgtgccactcctgtaatcatcgatgaaattctaccctctaagaaaatgaaagtttctaacaacaaaaagaagccagaggaagaaggcagtgctcatcaagatactgctgaaaagaatgcatcttccccagagaaagccaagggtagacatactgtgccttgtatgccacctgcaaagcagaagtttctaaaaagtactgaggagcaagagctggagaagagtatgaaaatgcagcaagaggtggtggagatgcggaaaaagaatgaagaattcaagaaacttgctctggctggaatagggcaacctgtgaagaaatcagtgagccaggtcaccaaatcagttgacttccacttccgcacagatgagcgaatcaaacaacatcctgagaaccaggaggaatataaggaagtgaactttacatctgaactacgaaagcatccttcatctcctgcccgagtgactaagggatgtaccattgttaagcctttcaacctgtcccaaggaaagaaaagaacatttgatgaaacagtttctacatatgtgccccttgcacagcaagttgaagacttccataaacgaacccctaacagatatcatttgaggagcaagaaggatgatattaacctgttaccctccaaatcttctgtgaccaagatttgcagagacccacagactcctgtactgcaaaccaaacaccgtgcacgggctgtgacctgcaaaagtacagcagagctggaggctgaggagctcgagaaattgcaacaatacaaattcaaagcacgtgaacttgatcccagaatacttgaaggtgggcccatcttgcccaagaaaccacctgtgaaaccacccaccgagcctattggctttgatttggaaattgagaaaagaatccaggagcgagaatcaaagaagaaaacagaggatgaacactttgaatttcattccagaccttgccctactaagattttggaagatgttgtgggtgttcctgaaaagaaggtacttccaatcaccgtccccaagtcaccagcctttgcattgaagaacagaattcgaatgcccaccaaagaagatgaggaagaggacgaaccggtagtgataaaagctcaacctgtgccacattatggggtgccttttaagccccaaatcccagaggcaagaactgtggaaatatgccctttctcctttgattctcgagacaaagaacgtcagttacagaaggagaagaaaataaaagaactgcagaaaggggaggtgcccaagttcaaggcacttcccttgcctcattttgacaccattaacctgccagagaagaaggtaaagaatgtgacccagattgaacctttctgcttggagactgacagaagaggtgctctgaaggcacagacttggaagcaccagctggaagaagaactgagacagcagaaagaagcagcttgtttcaaggctcgtccaaacaccgtcatctctcaggagccctttgttcccaagaaagagaagaaatcagttgctgagggcctttctggttctctagttcaggaaccttttcagctggctactgagaagagagccaaagagcggcaggagctggagaagagaatggctgaggtagaagcccagaaagcccagcagttggaggaggccagactacaggaggaagagcagaaaaaagaggagctggccaggctacggagagaactggtgcataaggcaaatccaatacgcaagtaccagggtctggagataaagtcaagtgaccagcctctgactgtgcctgtatctcccaaattctccactcgattccactgctaaactcagctgtgagctgcggataccgcccggcaatgggacctgctcttaacctcaaacctaggaccgtcttgctttgtcattgggcatggagagaacccatttctccagacttttacctacccgtgcctgagaaagcatacttgacaactgtggactccagttttgttgagaattgttttcttacattactaaggctaataatgagatgtaactcatgaatgtctcgattagactccatgtagttacttcctttaaaccatcagccggccttttatatgggtcttcactctgactagaatttagtctctgtgtcagcacagtgtaatctctattgctattgccccttacgactctcaccctctccccaactttttttaaaaattttaaccagaaaataaagatagttaaatcctaagatagagattaagtcatggtttaaatgaggaacaatcagtaaatcagattctgtcctcttctctgcataccgtgaatttatagttaaggatccctttgctgtgagggtagaaaacctcaccaactgcaccagtgaggaagaagactgcgtggattcatggggagcctcacagcagccacgcagcaggctctgggtggggctgccgttaaggcacgttctttccttactggtgctgataacaacagggaaccgtgcagtgtgcattttaagacctggcctggaataaatacgttttgtctttccctc

SEQ ID NO: 6546 - protein, 747 aa, Homo sapien
MSQVKSSYSYDAPSDFINFSSLDDEGDTQNIDSWFEEKANLENKLLGKNGTGGLFQGKTPLRKANLQQAIVTPLKPVDNTYYKEAEKENLVEQSIPSNACSSLEVEAAISRKTPAQPQRRSLRLSAQKDLEQKEKHHVKMKAKRCATPVIIDEILPSKKMKVSNNKKKPEEEGSAHQDTAEKNASSPEKAKGRHTVPCMPPAKQKFLKSTEEQELEKSMKMQQEVVEMRKKNEEFKKLALAGIGQPVKKSVSQVTKSVDFHFRTDERIKQHPENQEEYKEVNFTSELRKHPSSPARVTKGCTIVKPFNLSQGKKRTFDETVSTYVPLAQQVEDFHKRTPNRYHLRSKKDDINLLPSKSSVTKICRDPQTPVLQTKHRARAVTCKSTAELEAEELEKLQQYKFKARELDPRILEGGPILPKKPPVKPPTEPIGFDLEIEKRIQERESKKKTEDEHFEFHSRPCPTKILEDVVGVPEKKVLPITVPKSPAFALKNRIRMPTKEDEEEDEPVVIKAQPVPHYGVPFKPQIPEARTVEICPFSFDSRDKERQLQKEKKIKELQKGEVPKFKALPLPHFDTINLPEKKVKNVTQIEPFCLETDRRGALKAQTWKHQLEEELRQQKEAACFKARPNTVISQEPFVPKKEKKSVAEGLSGSLVQEPFQLATEKRAKERQELEKRMAEVEAQKAQQLEEARLQEEEQKKEELARLRRELVHKANPIRKYQGLEIKSSDQPLTVPVSPKFSTRFHC

SEQ ID NO: 6547 - DNA, 3909 bp, Homo sapien; identical to SEQ ID NO: 1936

SEQ ID NO: 6548 - protein, 1177 aa, Homo sapien; identical to SEQ ID NO: 1937

SEQ ID NO: 6549 - DNA, 2131 bp, Homo sapien
ctctttataatttagtttccatagaagttatatgtgcatttaaaaaaattcaatgctggagcgaccgtgtctggggagccgagccccgcttctcgctgcggtgagcccggactggggcacgcactgcgcagactccccgctgcagtgggcggagtcccacaggccccgcccctcctcccaccctcgttcagcctgtccagacagaagctggggcccagcggaggtagcagcagacgcctgagagcgaggccgaggccctcagggtttggagaccctgacacacccaccttctcacctgggctctgcgtatcccccagccttgagggaagatgaagcctaaactgatgtaccaggagctgaaggtgcctgcagaggagcccgccaatgagctgcccatgaatgagattgaggcgtggaaggctgcggaaaagaaagcccgctgggtcctgctggtcctcattctggcggttgtgggcttcggagcctgatgactcagctgtttctatgggaatacggcgacttgcatctctttgggcccaaccagcgcccagccccctgctatgacccttgcgaagcagtgctggtggaaagcattcctgagggcctggacttccccaatgcctccacggggaacccttccaccagccaggcctggctgggcctgctcgccggtgcgcacagcagcctggacatcgcctccttctactggaccctcaccaacaatgacacccacacgcaggagccctctgcccagcagggtgaggaggtcctccggcagctgcagaccctggcaccaaagggcgtgaacgtccgcatcgctgtgagcaagcccagcgggccccagccacaggcggacctgcaggctctgctgcagagcggtgcccaggtccgcatggtggacatgcagaagctgacccatggcgtcctgcataccaagttctgggtggtggaccagacccacttctacctgggcagtgccaacatggactggcgttcactgacccaggtcaaggagctgggcgtggtcatgtacaactgcagctgcctggctcgagacctgaccaagatctttgaggcctactggttcctgggccaggcaggcagctccatcccatcaacttggccccggttctatgacacccgctacaaccaagagacaccaatggagatctgcctcaatggaacccctgctctggcctacctggcgagtgcgcccccacccctgtgtccaagtggccgcactccagacctgaaggctctactcaacgtggtggacaatgcccggagtttcatctacgtcgctgtcatgaactacctgcccactctggagttctcccaccctcacaggttctggcctgccattgacgatgggctgcggcgggccacctacgagcgtggcgtcaaggtgcgcctgctcatcagctgctggggacactcggagccatccatgcgggccttcctgctctctctggctgccctgcgtgacaaccatacccactctgacatccaggtgaaactctttgtggtccccgcggatgaggcccaggctcgaatcccatatgcccgtgtcaaccacaacaagtacatggtgactgaacgcgccacctacatcggaacctccaactggtctggcaactacttcacggagacggcgggcacctcgctgctggtgacgcagaatgggaggggcggcctgcggagccagctggaggccattttcctgagggactgggactccccttacattcatgaccttgacacctcagctgacagcgtgggcaacgcctgccgcctgctctgaggcccgatccagtgggcaggccaaggcctgctgggcccccgcggacccaggtgctctgggtcacggtccctgtccccgcacccccgcttctgtctgccccattgtggctcctcaggctctctcccctgctctcccacctctacctccacccccaccggcctgacgctgtggccccgggacccagcagagctgggggagggatcagcccccaaagaaatgggggtgcatgctggcctgccccctggcccacccccactttccagggcaaaaagggcccagggttataataagtaaataacttgtctgtaaaaaaaaaaaaaaaaaaaaaaa

SEQ ID NO: 6550 - protein, 437 aa, Homo sapien
MTQLFLWEYGDLHLFGPNQRPAPCYDPCEAVLVESIPEGLDFPNASTGNPSTSQAWLGLLAGAHSSLDIASFYWTLTNNDTHTQEPSAQQGEEVLRQLQTLAPKGVNVRIAVSKPSGPQPQADLQALLQSGAQVRMVDMQKLTHGVLHTKFWVVDQTHFYLGSANMDWRSLTQVKELGVVMYNCSCLARDLTKIFEAYWFLGQAGSSIPSTWPRFYDTRYNQETPMEICLNGTPALAYLASAPPPLCPSGRTPDLKALLNVVDNARSFIYVAVMNYLPTLEFSHPHRFWPAIDDGLRRATYERGVKVRLLISCWGHSEPSMRAFLLSLAALRDNHTHSDIQVKLFVVPADEAQARIPYARVNHNKYMVTERATYIGTSNWSGNYFTETAGTSLLVTQNGRGGLRSQLEAIFLRDWDSPYIHDLDTSADSVGNACRLL

SEQ ID NO: 6551 - DNA, 6974 bp, Homo sapien
cggtgctggagaagtttgcgctgcggttcgtgagcgcagggtgcgggccccgccggccgctgcgcgcccgctgccatggctttccgcaggaggacgaaaagttacccgctcttcagccaggagttcgtcatccacaaccatgcggacatcggcttctgcctggtgctctgcgtcctcatcgggcttatgttcgaggtcacagccaagactgcctttctatttattttacctcagtataacattagcgtgcctacagcagacagtgagaccgtgcactaccactatggccctaaggacctggtcacaatcttgttctacatcttcatcaccatcatcttgcatgctgtggttcaggagtacattttagataaaatcagcaaacggcttcatctctccaaagtcaaacacagcaagttcaatgaatctggacagctggtcgtctttcatttcacctcggtgatttggtgcttctacgtggtggtgacggaaggatacttaacaaacccaagaagcctctgggaagactacccgcatgtgcacctccccttccaggtgaagtttttctacctatgccagctggcctactggctgcacgcacttcctgagctatacttccagaaggtacggaaggaggaaattccccgccagctccagtatatttgcctgtacctggtgcatatagctggagcatacctcttaaacctgagccgcctgggcctgatcttgctgctgctgcagtactcaactgagttcctcttccacacggctagactcttctactttgcagatgaaaacaacgagaaactgttcagtgcctgggctgctgtttttggggttacccgcctcttcatcctcacccttgccgtgctggccattggctttggactggctcgcatggaaaaccaggcatttgatcccgagaaagggaacttcaacactttgttttgcaggctctgcgtgctgctgctggtgtgtgccgcccaggcctggctcatgtggcgcttcatccactcccagctgcggcactggcgggaatactggaatgagcagagtgcaaagcggagagtcccagccacacccagactaccagccaggctcatcaagagggaatctggttaccatgaaaatggagtggtgaaggcagagaacggaacctccccacggactaagaaactcaagtctccctaaggccaaagtgctaagaacaggaatcctcttggtgggggccgagcagggggcaaggagcccaggccccctccctgcctcctccttcctgcctgtgatgctccgtctcaaacagccgaaacctgtcttgcaatggggggagggggcgtttcgctttccttcttcttggcttcctcttattcttccacaaaccattctcaataaagccaaaaatctttctctttctccccctcaggccacctcctgtcctcactcctgtcctgtgctggcttttctggaacgccaggcgcccatggctggcacctttctgcttgctctgtttcttgccttatggctgctgcttttcctttttacttcctattttcaccttatcttgcaatttttctgtctgatttttacaatgggaggggagctaagattgcagtcctgtccttcggtcccccagggcctgccggtcagaagcctggggctggtaggcccttggtggtcctcatgtggatgggcaagaagagagcggccatctcggatcataatctccttggtgctgattaactgacgagatatatgattccagttctgcatgtaccatcttgaggcacagcagccactgctcgttgtaaatgccaaggcatttggctttgggacgtgacaactcaatccagaaggatggtgtgaactcggttgggtcccgtgactcgagctcctaccagtggctggccgcggattggaagccagcctgctgtcgctctgtggggaggacatgtcttcccactgcttagagcgagagcagagcaaactgcgcagcaggcacctccagaaaggtaatggtggcagaacccacagtggagtcgacctaggcctttctccagcagtcccagtcgccattgctttttcagccattcacaagcattcaaaaccaaaccaaacagcagttcatatacctgcctgagataggctggtcctcacctccagagccagccagccccgtcaggggccaaacttactaccttgacttcatctctagctgcagaaacactaagtctcaagggcttcagccccatgctggtcccttggtgttcagggagggtcacttggaccgctgttcatctggccgcccttgttgagtgttctttggaattgtcgttttttgagcacaactacagcattttagactgcatgaaaccatgactgactgagagtcactctctgggtagatgataggcgcctttctggccccttccctcacagattctttcccctcccctccacctgaagagaaggcctccaagtccttttggtgccttgtgaggacttttagaaggggcgttcagctttaaaaagccggtcctaattacggccggacgcagtagcttacgcctgttatcccagcactttgggaggtcgaggtgggcagatcacctgaggttaggagttcaagaccagcctggccaacatggtgaaaccccatctctactaaaaatacaaaaaattaggtgtagtggcaggcacctgtaatcccagctactcgggaggctgaggcaggagaatcgcttgaacctagaaggtggaggttgcagtgagcggagattgtaccatggcactccagcctggacaacaagagcgaaattctgtctaaaaaaacaaaagtcccaattaagaacctccgaactctgttttgaggcaaaggggagtagttcttggtaggtgcaggaatagtagtgtcatttggaatactggtcatctttctgacatcacagtagaaaccaaaccttggatttagattcaaaaggggggaaatgggtcttttcatcaaggcaactccccttctccaagtcacttacatcatagataaattttagcttcccagtaactgagggatttgtttcctaacgccattggaggccttcatccctctctacgataaggttgcagaaatgggaagagctacccgtggttgcttttgattacccttaggaagtgagacagtgtttttgaaaatatgtatttctcccatttctccctctccttccctgacacttctctgggctgcacagcagaaacgttggtaaaagggcagtttggtttcaacacagcagacctgatatgggatcccttagccactttagtcaaacagccctgacagagtctataattgagttcaggccccccaccttgcctaataactgcaaatcgcatgttcagccagcagcctcctaagcccaccttcctcccccattagagaacacccatcctaggtgctctccaggctgtgtcattggcagggcttcacatgcaggaggcctctctcaggtgagtccaggttaaactgttgagttgtggcttcaacagatatgtatggcatgctgggatgtgccaggtgcctgcgttgtgccagttgctggagaggtagtgtgagcagagcagctgaaatcttgccatcaagcaaccctcattctcatgcctgtaggtttccattgctctgtcccaggacacttgcgtgccagagacgccacaacttcatgtccctgtctcttgcaagctccccgtgctgccagtacttcatgccttggatgtggtcccaccagcccagtggctggggtcagcttaggctctgcttcccagtggacgggtgtgctaagggtttattttatgtaaaaaaaaaaaaaaaacaaaaaaaaaccctgagaccatgagtggggctggcatcttgccagcctgggcttcagggatgtttggggggggtggttagagggtagttgtagggtactttgtcacccccctccccctgccaccctccctggcacgtttatttcacagcagagccaagtctgtggcaggttgacacagactgtgttgccagagctgaaataattccacttcatcctatgagcgtgttgggctagcttgttctaattttggccactttggctgttttcttcagttttatgcattctctcctgccccaaagtgccaagccatttgtgaaggctctgccagacacctccaagcttgagagctcagcaccatgcaccaagagcaggagaaaagacgtaaacctaccccagcaactgtggcctctcgacagccctggctaactaacttacatttgtggggaagccaacagacacagcaggaggagagggaggtggcgctggtggaccaaggatctgtgctacccgctcccctccttggaggtgcagtgatgatgggagttatttttaccatccgggcgctgatagctgcactattaataaattgcatgtgttccttttgaaggtaggggatggttctgggtgagaggggagcaggctgagccggcgggggatctgctgtcctcccttttgagtcagttctaatcccatgtgtgtctgggccaccagaccgaaatggttgctgagaaacttgtctgttcatgtcccaaggcataacttcccaacatttaagaaaccccaatagacacctctgccctggccacgttcacagatccttctcttgaccggaaaccctgggaccctaagaacccctgaagcttggggtgggtgtgtgcttctggggtctcttttgggacctcctttgtcagtaccccttcttttttctaagcagctaataagaggttgggtgaaagagtgcatctcctcccaggattccacaacaaaattcttatcttccatggatgctttaattggaagtgggttgccgacccccttgtgcctagaaaaggcctttgcttgggtttcctttgtatgcttcagccttcctagttggtttttctaggcctggtgtgagaggtagggaagtctgcacataactaattcttttgcttaagggcctatggcacaagtgcacaaacttcaattcttgatgttctaagctctctcctctaacagagggagtgctgaaagcttttgagtcaagacaatggagtgctcttcctccctcactctgccttccgagcttatggttccttttctcaggagaggattttcaggattattggaggattaggtcattgtcagatgactggaaaacctaaataggatctctctccagctcaaggttgtcccagtgaggaagactttaccaacttctcactctaccccactactcacatgagtgttagctccaccttgcaaaggctgaagaccagttctccccagtgaaagctgcctcattcttttatggagttccctggagtggcagagctataaagacgagcattgggatttgcagtctccatgtagcctttcgtgcttggcaacccctgtagactttttgtcccaagcagattgcgtgcgtgcgcctgtgtgtgagaataagtgccttactttgctgtgtggttttcaacttgtactccgtggccagcccccagttgccagggctcgacggcagccaaggacaccatacctcagtatagttatatataaaatggacacggattgtgacagtttcaccccatttgtttctaaccccgctgcccaggattagggtctgtggtgtgttctgttttgtttttggtttctcccttgtgtcagttctcttctggcccagctgggtggctgtggaagtctgtgaggtggcccaaccacaagcatacctattaagagaagcccagagcttccagcccccacttcgaaaactctcctctggccccacatagcaaactccttctccgttattttccccacccccagattttttttaaaaggcccacttgccataacctcttttggtctattttgcttcccattcagcccaaagtttatatgataaaggtgtttacttttacttcccagtctccaagtgctaacacataaacacatacatgtctgactgttgcagaactgttcgagctcctaattcagtgttaccttgttttagtcgcagcaaccctctcccctaccccttgcccgcccacgtttttctcactcttccgggttgtgcaataactctcccagccagtggtcctttccacagcctttctgtcccttaaaacacctgcaactgggggagaaatgggacccatgggagggggagtcatcatcccttacacaagaaatagccactttccttttgttgtcattcttgtgatcctgggtgggtttctgtggcactcttttagaacatgtagcatcatcttagaggtctatttttaaaaaatgtgttgaagaggaaaaaaccattctcacgatggggcttaagtcattgtccaggaataagattggcgtggtgcccatgacatcaccgtcactctgcctaaaagcactctagagctacttgttcacgtggagaggaaggatattttgcgaagcaacagccgcaggtggagagccctgttcacctgatagggtctagctgtgacagtaaatataataccgctgtttccttgggtacagatttgagtgttcatgtgatgagactgtaaacctcatttttcggttcctctgtttaaaaaaacatctgaaggatgaactaaggctgctggtgccctgagcaactgataatgcaaatgtggacaaagtgtctgttttctactctagcctgttcatatggaccaaatttcaacaaggaactcaaggaaaatttgtacctgccgtatttatgctttcatgtaaaaaagggttggggggaggggtgtctttttgcttttggtgaactttttttcaaaatcatttttccactgtttctgtctggttttaaaacaaattacagttttgtatggattttttaaatgtacattttggaacaaatgatcaaatattttctgaaataacaataaaaggcagaaaatt

SEQ ID NO: 6552 - protein, 370 aa, Homo sapien
MAFRRRTKSYPLFSQEFVIHNHADIGFCLVLCVLIGLMFEVTAKTAFLFILPQYNISVPTADSETVHYHYGPKDLVTILFYIFITIILHAVVQEYILDKISKRLHLSKVKHSKFNESGQLVVFHFTSVIWCFYVVVTEGYLTNPRSLWEDYPHVHLPFQVKFFYLCQLAYWLHALPELYFQKVRKEEIPRQLQYICLYLVHIAGAYLLNLSRLGLILLLLQYSTEFLFHTARLFYFADENNEKLFSAWAAVFGVTRLFILTLAVLAIGFGLARMENQAFDPEKGNFNTLFCRLCVLLLVCAAQAWLMWRFIHSQLRHWREYWNEQSAKRRVPATPRLPARLIKRESGYHENGVVKAENGTSPRTKKLKSP

SEQ ID NO: 6553 - DNA, 1929 bp, Homo sapien
tagctggctgagaggggactgggcgccggcggggaaggaggagcgctaggtcggtgtacgaccgagattagggtgcgtgccagctccgggaggccgcggtgaggggccgggcccaagctgccgacccgagccgatcgtcagggtcgccagcgcctcagctctgtggaggagcagcagtagtcggagggtgcaggatattagaaatggctactccccagtcaattttcatctttgcaatctgcattttaatgataacagaattaattctggcctcaaaaagctactatgatatcttaggtgtgccaaaatcggcatcagagcgccaaatcaagaaggcctttcacaagttggccatgaagtaccaccctgacaaaaataagagcccggatgctgaagcaaaattcagagagattgcagaagcatatgaaacactctcagatgctaatagacgaaaagagtatgatacacttggacacagtgcttttactagtggtaaaggacaaagaggtagtggaagttcttttgagcagtcatttaacttcaattttgatgacttatttaaagactttggcttttttggtcaaaaccaaaacactggatccaagaagcgttttgaaaatcatttccagacacgccaggatggtggttccagtagacaaaggcatcatttccaagaattttcttttggaggtggattatttgatgacatgtttgaagatatggagaaaatgttttcttttagtggttttgactctaccaatcagcatacagtacagactgaaaatagatttcatggatctagcaagcactgcaggactgtcactcaacgaagaggaaatatggttactacatacactgactgttcaggacagtagttcttattctattctcactaaatccaactggttgactcttcctcattatctttgatgctaaacaattttctgtgaactattttgacaagtgcatgatttcactttaaacaatttgatatagctattaaatatatttaagggtttttttttttttgacaaattcaacattcaacgagtagacaaaatgctaattatttccctgattaggaaagtttctttaaaaaacacgtaattttgcctagtgctttttctctacctgcccttgggctcactaatatcaccagtattattaccaagaaaatattgagtttacctgattaaactttaaaagttaattgtagatttaaattgtgtgaacctaatgatttttgcagtgaaacctttactaattcaaagttgcatgttctatgacatctgtgacttgcgttgcagagtgtacatgaaactgtataattgagtcattcagtaaaggagaacagtatcttggttaattgctactgaaaggttgagaaaggaatggtttgatatttaccacagcgctgtgcctttctacagtagaactggggtaaaggaaatggttttattgcccatagtcatttaggctggaaaaaagttgaaaacttaacgaaatattgccaagagattgttatgtgtttggttccagcctaaaaatgattttgtagtgttgaaatcatagctacttacatagctttttcatatttctttcttagttgttggcactcttaggtcttagtatggatttatgtgtttgtgtgtgtgtagtttatcctctctctcatctttatctagagattgactgatacctcattctgtttgtaaaaccagccagtaatttctgtgcaaccttactatgtgcaatatttttaaatcctgagaaatgtgtgcttttgttttcggatagacttatttctttagttctgcacttttccacattatactccatatgagtattaatcctatggatacatattaaaacaagtgtctcatacaacattgtatgtgagagaaatataaatatttacaacctgaaaaa

SEQ ID NO: 6554 - protein, 223 aa, Homo sapien; identical to SEQ ID NO: 915

SEQ ID NO: 6555 - DNA, 4290 bp, Homo sapien; identical to SEQ ID NO: 3733
  Unsure 3043: Unknown base

SEQ ID NO: 6556 - protein, 1225 aa, Homo sapien; identical to SEQ ID NO: 3734

SEQ ID NO: 6557 - DNA, 2333 bp, Homo sapien
gggccaggccgcgcccccgcgtgcgtgcgcggcccggcagagccgtgcgggcgcccgcgtactcactagctgaggtggcagtggttccaccaacatggagctctcgcagatgtcggagctcatggggctgtcggtgttgcttgggctgctggccctgatggcgacggcggcggtagcgcgggggtggctgcgcgcgggggaggagaggagcggccggcccgcctgccaaaaagcaaatggatttccacctgacaaatcttcgggatccaagaagcagaaacaatatcagcggattcggaaggagaagcctcaacaacacaacttcacccaccgcctcctggctgcagctctgaagagccacagcgggaacatatcttgcatggactttagcagcaatggcaaatacctggctacctgtgcagatgatcgcaccatccgcatctggagcaccaaggacttcctgcagcgagagcaccgcagcatgagagccaacgtggagctggaccacgccaccctggtgcgcttcagccctgactgcagagccttcatcgtctggctggccaacggggacaccctccgtgtcttcaagatgaccaagcgggaggatgggggctacaccttcacagccaccccagaggacttccctaaaaagcacaaggcgcctgtcatcgacattggcattgctaacacagggaagtttatcatgactgcctccagtgacaccactgtcctcatctggagcctgaagggtcaagtgctgtctaccatcaacaccaaccagatgaacaacacacacgctgctgtatctccctgtggcagatttgtagcctcgtgtggcttcaccccagatgtgaaggtttgggaagtctgctttggaaagaagggggagttccaggaggtggtgcgagccttcgaactaaagggccactccgcggctgtgcactcgtttgctttctccaacgactcacggaggatggcttctgtctccaaggatggtacatggaaactgtgggacacagatgtggaatacaagaagaagcaggacccctacttgctgaagacaggccgctttgaagaggcggcgggtgccgcgccgtgccgcctggccctctcccccaacgcccaggtcttggccttggccagtggcagtagtattcatctctacaatacccggcggggcgagaaggaggagtgctttgagcgggtccatggcgagtgtatcgccaacttgtcctttgacatcactggccgctttctggcctcctgtggggaccgggcggtgcggctgtttcacaacactcctggccaccgagccatggtggaggagatgcagggccacctgaagcgggcctccaacgagagcacccgccagaggctgcagcagcagctgacccaggcccaagagaccctgaagagcctgggtgccctgaagaagtgactctgggagggcccggcgcagaggattgaggaggagggatctggcctcctcatggcgctgctgccatctttcctcccaggtggaagcctttcagaaggagtctcctggttttcttactggtggccctgcttcttcccattgaaactactcttgtctacttaggtctctctcttcttgctggctgtgactcctccctgactagtggccaaggtgcttttcttcctcccaggcccagtgggtggaatctgtccccacctggcactgaggagaatggtagagaggagaggagagagagagagaatgtgatttttggccttgtggcagcacatcctcacacccaaagaagtttgtaaatgttccagaacaacctagagaacacctgagtactaagcagcagttttgcaaggatgggagactgggatagcttcccatcacagaactgtgttccatcaaaaagacactaagggatttccttctgggcctcagttctatttgtaagatggagaataatcctctctgtgaactccttgcaaagatgatatgaggctaagagaatatcaagtccccaggtctggaagaaaagtagaaaagagtagtactattgtccaatgtcatgaaagtggtaaaagtgggaaccagtgtgctttgaaaccaaattagaaacacattccttgggaaggcaaagttttctgggacttgatcatacattttatatggttgggacttctctcttcgggagatgatatcttgtttaaggagacctcttttcagttcatcaagttcatcagatatttgagtgcccactctgtgcccaaataaatatgagctggggattaaaaaaaaaaaaaaaaaaaaaaaaaaaaaaaaaaaaaaaaaaaaaaaaaaaaaaaaaaaa

SEQ ID NO: 6558 - protein, 447 aa, Homo sapien
MELSQMSELMGLSVLLGLLALMATAAVARGWLRAGEERSGRPACQKANGFPPDKSSGSKKQKQYQRIRKEKPQQHNFTHRLLAAALKSHSGNISCMDFSSNGKYLATCADDRTIRIWSTKDFLQREHRSMRANVELDHATLVRFSPDCRAFIVWLANGDTLRVFKMTKREDGGYTFTATPEDFPKKHKAPVIDIGIANTGKFIMTASSDTTVLIWSLKGQVLSTINTNQMNNTHAAVSPCGRFVASCGFTPDVKVWEVCFGKKGEFQEVVRAFELKGHSAAVHSFAFSNDSRRMASVSKDGTWKLWDTDVEYKKKQDPYLLKTGRFEEAAGAAPCRLALSPNAQVLALASGSSIHLYNTRRGEKEECFERVHGECIANLSFDITGRFLASCGDRAVRLFHNTPGHRAMVEEMQGHLKRASNESTRQRLQQQLTQAQETLKSLGALKK

SEQ ID NO: 6559 - DNA, 745 bp, Homo sapien
gtatctgtggtaaacccagtgacacgggggagatgacatacaaaaagggcaggacctgagaaagattaagctgcaggctccctgcccataaaacagggtgtgaaaggcatctcagcggctgccccaccatggctacctgggccctcctgctccttgcagccatgctcctgggcaacccaggtctggtcttctctcgtctgagccctgagtactacgacctggcaagagcccacctgcgtgatgaggagaaatcctgcccgtgcctggcccaggagggcccccagggtgacctgttgaccaaaacacaggagctgggccgtgactacaggacctgtctgacgatagtccaaaaactgaagaagatggtggataagcccacccagagaagtgtttccaatgctgcgacccgggtgtgtaggacggggaggtcacgatggcgcgacgtctgcagaaatttcatgaggaggtatcagtctagagttacccagggcctcgtggccggagaaactgcccagcagatctgtgaggacctcaggttgtgtataccttctacaggtcccctctgagccctctcaccttgtcctgtggaagaagcacaggctcctgtcctcagatcccgggaacctcagcaacctctgccggctcctcgcttcctcgatccagaatccactctccagtctccctcccctgactccctctgctgtcctcccctctcacgagaataaagtgtcaagcaagaaaaaaa

SEQ ID NO: 6560 - protein, 145 aa, Homo sapien; identical to SEQ ID NO: 56

SEQ ID NO: 6561 - DNA, 3002 bp, Homo sapien; identical to SEQ ID NO: 1850

SEQ ID NO: 6562 - protein, 724 aa, Homo sapien; identical to SEQ ID NO: 1851

SEQ ID NO: 6563 - DNA, 2116 bp, Homo sapien; identical to SEQ ID NO: 27

SEQ ID NO: 6564 - protein, 80 aa, Homo sapien; identical to SEQ ID NO: 28

SEQ ID NO: 6565 - DNA, 1869 bp, Homo sapien
aggcaaaatgcatgacagtaacaatgtggagaaagacattacaccatctgaattgcctgcaaacccaggttgtgtgcattcaaaagagcattctattaaagctaccttaatttggcgcttatttttcttaatcatgtttctgacaatcatagtgtgtggaatggttgctgctttaagtgcaataagagctaactgccatcaagagccatcagtatgtcttcaagctgcatgcccagaaagctggattggttttcaaagaaagtgtttctatttttctgatgacaccaagaactggacatcaagtcagaggttttgtgactcacaagatgctgatcttgctcaggttgaaagcttccaggaactgaatttcctgttgagatataaaggcccatctgatcactggattgggctgagcagagaacaaggccaaccatggaaatggataaatggtactgaatggacaagacagtaagttctaaaaatctggcagtaatatttgtatttgaatttactttgcattaaatctgaagtgttctctagttacatgctttaaaaaattctcattttaaggttagtcatgaaagaagatggtgccaacttgtatgttgcaaaggtttcacaagttcctcgaatgaatccaagacctgtcatggtgaggtagactgactgtgaacttggctccaggcttatctatgtcattttcaaacactttcattttaagcaaaccatacaatatctttaagtctgttccttacctccacaacaaaattaaattgcacttgtcctcctgatttcacagggttgatgtgaggaacagaggttttgatgtatcagggaaagattatgagtgacagcaattatacctattatttaaaataagacaatagttttaaaattttaaaatgggtaaagtttggcactagaaaatttaatctcaattgtatatttataggatcttcagattactaaaaagatttgagataatgctggaaaaattggattcacacaatttcactcaatgtttgtctgagagatgagacagttttgaaaagctactttattgtaatacattcatcaatattggaaatataactttatttaataaaaagagccccagactggacattggcaggtttgaaatgagttttttctcattagcttttgaccttggatgggatggtaagttttagaaatcagagaacatgtacatttatacattgttgtatctacactgccttgcacattgtgactgcttcataaatatctagaattaacttttatttcttattttacaatacggaagtagtaaattttctctacctaattcttaaaatggttttttgtttgtttgtatttttgagagacagggtcttactctgttacccaggctggagtgcagtagtaccatcgtggctcactgcagccttgacttccctggctcaagtgagcctcccatctcaggctcctgagtagctgggactacaggtttcctatcctgggagcaggagagtgtgcctatttgaatgacaaaggtgccagtagtgccaggcactacacagagaggaagtggatttgttccaaatcagatatacatgtctagatgttacagcaaagccccaactaatctttagaagcatattggaactgataactccattttaaaatgagcaaagaatttatttcttataccaacaggtatatgaaaatatgctcaatatcactaataactgggaaaatacaaatcaaaatcatagtaaaatattacctgttttcatggtgctaatattacctgttctcccactgctaatgacatacccgagactgagtaatttataaataaaagagatttaattgaaaaaaaaaaaaaaa

SEQ ID NO: 6566 - protein, 154 aa, Homo sapien
MHDSNNVEKDITPSELPANPGCVHSKEHSIKATLIWRLFFLIMFLTIIVCGMVAALSAIRANCHQEPSVCLQAACPESWIGFQRKCFYFSDDTKNWTSSQRFCDSQDADLAQVESFQELNFLLRYKGPSDHWIGLSREQGQPWKWINGTEWTRQ

SEQ ID NO: 6567 - DNA, 2331 bp, Homo sapien; identical to SEQ ID NO: 627

SEQ ID NO: 6568 - protein, 731 aa, Homo sapien; identical to SEQ ID NO: 628

SEQ ID NO: 6569 - DNA, 1272 bp, Homo sapien; identical to SEQ ID NO: 1904

SEQ ID NO: 6570 - protein, 319 aa, Homo sapien; identical to SEQ ID NO: 1905

SEQ ID NO: 6571 - DNA, 5043 bp, Homo sapien
cgcccgcgcgccccgggagcctacccagcacgcgctccgcgcccactggttccctccagccgccgccgtccagccgagtccccactccggagtcgccgctgccgcggggacatggtcctctgcgttcaggggtaagcgcggctctctgcccccttcccggccaccacgaggggcgcacgggagaacaggggcttcgtgctagctgccgggcattgggagggcttgacgggccagaggtgactgagcgcagacggacctcaggagcaaggctctgtgtggggctgtgacactcccactccccgcccccacacacttacctcaattcccactgtggattgggaaaccgggggctggccggctaaaggaggaactcacagggtgggctcagcctgggttctcattggagcagatggatgctaacggcacggcgtcccccaagatgtggccaacaatcccagatattcttctgggcccagagcactctacgctagcctgcctgctgccctgcctgctagtaaccttggaccagcccctggccccctctgtcctggtgtcccctctcctgccccaggctagcaagtaggctcttcttgggaagccagccgcagatccttgcctttcctcaggctggccacctgatggtctgcaactctcgggaggccctgggtttggcctggtcctgcttggggtacccccacaatcgtctcacaaccctgtctcagcccagtctgggatcccaatgtgagaaggaccttggctcctgcctctcatcttcaaatttcccagacttgaggtaagggacagtggagaggggatgctgataagacagagtcttgacctgagctgagcattcctggccatccactctgtcctgaacctcagcaaccccttcaaccaaagggtctgatgctggccatggtgatgtgacaggagctcaggaagctccaaggagagaggaagaaggtataaatgggtgttctgcactcagggaggactgggtggctgtgcttatcgcaactggcctggtgccaagtgagggagggtggaaggtgaggccaaggaagaggacatggaggtgctgggaagactacttctcccttgctgtctccagcaagttccttcctcctgtctgcattctgggactcctgaatacctgccccaccactgccttccaccccaggagcctccccctgcattccggggtcccatagcctctttcactttttaccctaggtgagcacccccttgtaagctcagggctactgttgggtgtcagggaacaaagttttagactgctgcgctccaaagcgggcacacacatgtacctagaacacaccagccactgtccccaccatgatgatgacacagccatggacacacccctgcccaggtacacactcaccaggagcttgtggtgatcaacacagctattcatacacccagctaccacatcagccccaaaggtgcccacacctacatgtgggatctgaggaccggctaagctatctggacgtggccacccacagaggttccagcctgactggctagccaccaaccatgctcctgggaaggtagctctgggccccagcaagcaggtcatctcaaaatttggcctccagctctccaagagggatttccaagatcccacagtacagccagggtaggtgtggaaaagtttttgtcaggctgtggtgtgccagagttgtgtggccctttctcactgtgagtggtcatagggccatgatttgttagaacctagagggtcacctataacctacacaggagtcaggtctggctcctgccaccagctcctgcctgcgccttcctgcctcacaagcaatactggcgctgtttgcccatgctgtcctctctacctggggtcccttcccccagctccttcctttggcctggaagacacagctcaggagcaagcagaccctgactcccccgtgacacctgcagttttatgactttgcattataattactcttagtgtcatcttccccagccagtctggttctccttgagggcaaggccatggtttcattatggcggtgtcctgaggcccagccagggactagacccagaactaaggcttggagatgtattttgcaaggagtgagggaggagcagctgtcttcctggggaagtagagccagtccctgctgccctcccaaggaggaagccctagtatcaccctgctgggtgggcttcccctaggagaaagctgctactcagattttggtcggctcagttcccccaaccccagccatccaagaatatggtgttactgaacctctcagtgcatgggttggtgggaccctttattgcggaaaagggaaactgaagcccagtgaagagcaagctttgtacaagatcgtagagcctggtagggctggcttgccagggtgggaactggagtgtggattaggtccctgcccttggtgggagctcatactgacaggaggtgagacttgccagtgcctttagaggccactgtccaccccagaccctccactgggagaagcagaggccaggataggctgacttgtatgggtaggggattatttcagtctctaagtcctggccagtgtggacctaggtccctctgagagacactcctatccatggggaggtagcgtgtgacctcaggcagcctaccataatcctggggcttctctggaggaccccacacagatctatcataggataaatctacttgtctgtcgtagatctatctcaactaggaccattcatcagtgggccatttaatcagcccacttcagccaggagggcacaaacatgaagctactttgcactgaatcctatcagtgtggtgagaacattagacatgcctatagggaatgatctgtgtttttggttgatataaaatagagagcaattaattactgtttagtaaatgcagggcagtggaaaagaatctttcaaaagaggatccccacatggaaacaatcaaggtggcttttgtgatgacaagtggggaacgagatactggactaactgagcccatggctgggtagaggggaagctgaggctcatagtgagatgggccagccagaggtcatgaaactagtctggggcataggggggtctctggagatgggggaagcatgggtcctccactcactgctcatccactgccttctagacctcgtcctttgctggctgtggagcggactgggcagcggcccctgtgggccccgtccctggaactgcccaagccagtcatgcagcccttgcctgctggggccttcctcgaggaggtggcagagggtaccccagcccagacagagagtgagccaaaggtgctggacccagaggaggatctgctgtgcatagccaagaccttctcctaccttcgggaatctggctggtattggggttccattacggccagcgaggcccgacaacacctgcagaagatgccagaaggcacgttcttagtacgtgacagcacgcaccccagctacctgttcacgctgtcagtgaaaaccactcgtggccccaccaatgtacgcattgagtatgccgactccagcttccgtctggactccaactgcttgtccaggccacgcatcctggcctttccggatgtggtcagccttgtgcagcactatgtggcctcctgcactgctgatacccgaagcgacagccccgatcctgctcccaccccggccctgcctatgcctaaggaggatgcgcctagtgacccagcactgcctgctcctccaccagccactgctgtacacctaaaactggtgcagccctttgtacgcagaagcagtgcccgcagcctgcaacacctgtgccgccttgtcatcaaccgtctggtggccgacgtggactgcctgccactgccccggcgcatggccgactacctccgacagtaccccttccagctctgactgtacggggcaatctgcccaccctcacccagtcgcaccctggaggggacatcagccccagctggacttgggcccccactgtccctcctccaggcatcctggtgcctgcatacctctggcagctggcccaggaagagccagcaagagcaaggcatgggagaggggaggtgtcacacaacttggaggtaaatgcccccaggccgcatgtggcttcattatactgagccatgtgtcagaggatggggagacaggcaggaccttgtctcacctgtgggctgggcccagacctccactcgcttgcctgccctggccacctgaactgtatgggcactctcagccctggtttttcaatccccagggtcgggtaggacccctactggcagccagcctctgtttctgggaggatgacatgcagaggaactgagatcgacagtgactagtgaccccttgttgaggggtaagccaggctaggggactgcacaattatacactatttatttatttattctccttggggttggtgtcaggggcgagccaaccccacctctatgccctgagccctggtagtccagagaccccaactctgccctggcttctctggttcttccctgtggaaagcccatcctgagacatcttgctggaaccaaggcaatcctggatgtcctggtactgacccacccgtctgtgaatgtgtccactctcttctgcccccagccatatttggggaggatggacaactacaataggtaagaaaatgcagccggagcctcagtccccagcagagcctgtgtctcaccccctcacaggacagagctgtatctgcatagagctggtctcactgtggcgcaggccccggggggagtgcctgtgctgtcaggaagagggggtgctggtttgagggccaccactgcagttctgctaggtctgcttcctgcccaggaaggtgcctgcacatgagaggagagaaatacacgtctgataagacttcatgaaataataattatagcaaagaacagtttggtggtcttttctcttccactgatttttctgtaatgacattatacctttattacctctttattttattacctctataataaaatgatacctttcatgt

SEQ ID NO: 6572 - protein, 264 aa, Homo sapien
MGPPLTAHPLPSRPRPLLAVERTGQRPLWAPSLELPKPVMQPLPAGAFLEEVAEGTPAQTESEPKVLDPEEDLLCIAKTFSYLRESGWYWGSITASEARQHLQKMPEGTFLVRDSTHPSYLFTLSVKTTRGPTNVRIEYADSSFRLDSNCLSRPRILAFPDVVSLVQHYVASCTADTRSDSPDPAPTPALPMPKEDAPSDPALPAPPPATAVHLKLVQPFVRRSSARSLQHLCRLVINRLVADVDCLPLPRRMADYLRQYPFQL

SEQ ID NO: 6573 - DNA, 1372 bp, Homo sapien; identical to SEQ ID NO: 3473

SEQ ID NO: 6574 - protein, 63 aa, Homo sapien; identical to SEQ ID NO: 3474

SEQ ID NO: 6575 - DNA, 5633 bp, Homo sapien
caggggcgcggcggggccggagagaggcggtcccctgggaggacggggtctcccctcgttgcctttgtagtggagaaggtggacaagtggcagtcggcgtgatcgcagggaagcggggccggcgcgggcggccgagggtccaggcgagcccgcgggcggacgggagatgccgctgctacaccgaaagccgtttgtgagacagaagccgcccgcggacctgcggcccgacgaggaagttttctactgtaaagtcaccaacgagatcttccgccactacgatgacttttttgaacgaaccattctgtgcaacagccttgtgtggagttgtgctgtgacgggtagacctggactgacgtatcaggaagcacttgagtcagaaaaaaaagcaagacagaatcttcagagttttccagaaccactaattattccagttttatacttgaccagccttacccatcgttcgcgcttacatgaaatttgtgatgatatctttgcatatgtcaaggatcgatattttgtcgaagaaactgtggaagtcattaggaacaatggtgcaaggttgcagtgtaggattttggaagtcctccctccatcacatcaaaatggttttgctaatggacatgttaacagtgtggatggagaaactattatcatcagtgatagtgatgattcagaaacacaaagctgttcttttcaaaatgggaagaaaaaagatgcaattgatcccttactattcaagtataaagtgcaacccactaaaaaagaattacatgagtctgctattgttaaagcaacacaaatcagccggagaaaacacctattttctcgtgataaactaaagctttttctgaagcaacactgtgaaccacaagatggagtcattaaaataaaggcatcatctctttcaacgtataaaatagcagaacaagatttttcttatttcttccctgatgatccacccacatttatcttcagtcctgctaacagacgaagagggagacctcccaaacgaatacatattagtcaagaggacaatgttgctaataaacagactcttgcaagttataggagcaaagctactaaagaaagagataaacttttgaaacaagaagaaatgaagtcactggcttttgaaaaggctaaattaaaaagagaaaaagcagatgccctagaagcgaagaaaaaagaaaaagaagataaagagaaaaagagggaagaattgaaaaaaattgttgaagaagagagactaaagaaaaaagaagaaaaagagaggcttaaagtagaaagagaaaaggaaagagagaagttacgtgaagaaaagcgaaagtatgtggaatacttaaaacagtggagtaaacctagagaagatatggaatgtgatgaccttaaggaacttccagaaccaacaccagtgaaaactagactacctcctgaaatctttggtgatgctctgatggttttggagttccttaatgcatttggggaactttttgatcttcaagatgagtttcctgatggagtaaccctagaagtattagaggaagctcttgtaggaaatgacagtgaaggcccactgtgtgaattgctttttttcttcctgactgcaatcttccaggcaatagctgaagaagaagaggaagtagccaaagagcaactaactgatgctgacaccaaagatttaacagaggctttggatgaagatgcagaccccacaaaatctgcactgtctgcagttgcatctttggcagctgcatggccacagttacaccagggctgcagtttgaaaagtttggatcttgatagctgcactctttcagacatcctcagactgcacatcttagcttcaggtgctgatgtaacatcagcaaatgcaaagtatagatatcaaaaacgaggaggatttgatgctacagatgatgcttgtatggagcttcgtttgagcaatcccagtctagtgaagaaactgtcaagcacctcagtgtatgatttgacaccaggagaaaaaatgaagatactccatgctctctgtggaaagctactgaccctagtttcaactagggattttattgaagattatgttgatatattacgacaggcaaagcaggagttccgggaattaaaagcagaacaacatcgaaaagagagggaagaagcagctgccagaattcgtaaaaggaaggaagaaaaacttaaggagcaagaacaaaaaatgaaagagaaacaagaaaaactgaaagaagatgagcaaagaaattcaacggcagatatatctattggggaggaagaaagggaagattttgatactagcattgagagcaaagacacagagcaaaaggaattagatcaagatatggtcactgaagatgaagatgacccaggatcacataaaagaggcagaagggggaaaagaggacaaaatggatttaaagaatttacaaggcaagaacagatcaactgtgtaacaagagagcctcttactgctgatgaggaagaagcattaaaacaggaacaccaacgaaaagagaaagagctcttagaaaaaatccaaagtgccatagcctgtaccaatatctttcccttgggtcgcgaccgcatgtatagacgatactggattttcccttctattcctggactctttattgaagaggattattctggtcttactgaagacatgctgttgcctagaccttcatcatttcagaataatgtacagtctcaagatcctcaggtatccactaaaactggagagcctttgatgtctgaatctacctccaacattgaccaaggtccacgtgaccattctgtgcagctgccaaaaccagtgcataagccaaatcggtggtgcttttacagttcttgtgaacagctagaccagcttattgaagctcttaattctagaggacatagagaaagtgccttaaaagaaactttgttacaagagaaaagcagaatatgtgcacagctagcccgtttttctgaagagaaatttcatttttcagacaaacctcagcctgatagcaaaccaacatatagtcggggaagatcttccaatgcatatgatccatctcagatgtgtgcagaaaagcaacttgaactaaggctgagagattttcttttagatattgaagatagaatctaccaaggaacattaggagccatcaaggttacagatcgacatatctggagatcagcattagaaagtggacggtatgagctgttaagtgaggaaaacaaggaaaatgggataattaaaactgtgaatgaagacgtagaagagatggaaattgatgaacaaacaaaggtcatagtaaaagacagacttttggggataaaaacagaaactccaagtactgtatcaacaaatgcaagtacaccacaatcagtgagcagtgtggttcattatctggcaatggcactctttcaaatagagcagggcattgagcggcgttttctgaaagctccacttgatgccagtgacagtgggcgttcttataaaacagttctggaccgttggagagagtctctcctttcttctgctagtctatcccaagtttttcttcacctatccaccttggatcgtagcgtgatatggtctaaatctatactgaatgcgcgttgcaagatatgtcgaaagaaaggcgatgctgaaaacatggttctttgtgatggctgtgataggggtcatcatacctactgtgttcgaccaaagctcaagactgtgcctgaaggagactggttttgtccagaatgtcgaccaaagcaacgttctagaagactctcctctagacagagaccatccttggaaagtgatgaagatgtggaagacagtatgggaggtgaggatgatgaagttgatggcgatgaagaagaaggtcaaagtgaggaggaagagtatgaggtagaacaagatgaagatgactctcaagaagaggaagaagtcagcctacccaaacgaggaagaccacaagttagattgccagttaaaacaagagggaaacttagctcttctttctctagtcgtggccaacaacaagaacctggaagatacccttcaaggagtcagcagagcacacccaaaacaactgtttcttctaaaactggtagaagcctaagaaagataaactctgctcctcctacagaaacaaaatctttaagaattgccagtcgttctactcgccacagtcatggcccactgcaagcagatgtatttgtggaattgcttagtcctcgtagaaaacgcagaggcaggaaaagtgctaataaaacaccagaaaatagtcccaacttccctaacttcagagtcattgccacaaagtcaagtgaacagtcaagatctgtaaatattgcttcaaaactttctctccaagagagtgaatccaaaagaagatgcaaaaaaagacaatctccagagccatcgcctgtgacactgggtcgaaggagttctggccgacagggaggagttcatgaattgtctgcttttgaacaacttgttgtagaattggtacgacatgatgacagctggccttttttgaaacttgtttctaaaatccaggtcccagactactatgacatcatcaaaaagcccattgccttaaatataattcgtgaaaaagtgaataagtgtgaatataaattagcatctgagtttattgatgacattgagttaatgttttcgaactgctttgaatacaaccctcgtaacacaagtgaagcaaaagctggaactaggcttcaagcattttttcatattcaggctcaaaagcttggactccacgtcacacccagtaatgtggaccaagttagcacaccaccggctgcgaaaaagtcacgaatctgactttgtccttctaaaggatatatttgaagaaaaacaaattgttcatgaaaatggaacattaaatcatgctgtataaagcaataacaaacaattgattgaccacatgaaagtgtggcctgcactatattctcaattttaatattaagcactcaggagaatgtaggaaagatatcctttgctacagttttgttcagtatctaataagtttgatagatgtattggatacagtactggtttacagaggtttttgtacatttttgagatcattcatgtgtccagagatcttggaaaatattttttcacccacgatttattttgttattgatgatttttttttaaagtggtggtattaagggagagttatctacatggatgagtcttccgctatagcacagtttagaaaaggtgtttatgtcttaattaattgtttgagtacattctttcaacactacacatgaatgaatccaatcttataaccttgaagtgctgtaccagtgctggctgcaggtattaagtccaagtttattaactagatatttatttagtattgagagtaatttgtgaatttgttttgtatttataaaatttatacctgaaaaatgttccttaatgttttaaaccttttactgtgtttttattcctctaacttccttaatgatcaatcaaaaaaagtaacaccctccctttttcctgacagttctttcagctttacagaactgtattataagtttctatgtataactttttaactgtacaaataaaataacattttttcaaataaaaaaaaaaaaaaaaa

SEQ ID NO: 6576 - protein, 1556 aa, Homo sapien [sequence omitted]

SEQ ID NO: 6577 - DNA, 1495 bp, Homo sapien; identical to SEQ ID NO: 3653

SEQ ID NO: 6578 - protein, 283 aa, Homo sapien; identical to SEQ ID NO: 3654

SEQ ID NO: 6579 - DNA, 1283 bp, Homo sapien
cggacgcgtgggcgttactcactcttcctccttcccctcctcgccgactcccgggctctgggcccctgggggagggaagaggcctcctatctactcctctgccccagtcccctccttgcgtcagtcccagtgagggataagcgcctggcggaaggcgcagggaggtgtttctctgcttcaggagtgcccgccggcccttgcagctgctggaagacccatttatctcatgcttcttgttttctttggggacctgcaggggaaggaagcagggtgacggtttggtatccccacctaagaccctcccctttcccctgaggccagccgtcagcccctggcagggggtcttggaagccagaggtttttgctcagggcagggaaagggctgcaggatccccgggggctgccggaggtcggtctcactgacatcatggctgaccccagcatcgcctggtcccacagatgtcgccctctggtcgcctgtgtcttcttaccatcgttggcctgattctccccaccagaggacagacgttgaaagataccacgtccagttcttcagcagactcaactatcatggacattcaggtcccgacacgagccccagatgcagtctacacagaactccagcccacctctccaaccccaacctggcctgctgatgaaacaccacaaccccagacccagacccagcaactggaaggaacggatgggcctctagtgacagatccagagacacacaagagcaccaaagcagctcatcccactgatgacaccacgacgctctctgagagaccatccccaagcacagacgtccagacagacccccagaccctcaagccatctggttttcatgaggatgaccccttcttctatgatgaacacaccctccggaaacgggggctgttggtcgcagctgtgctgttcatcacaggcatcatcatcctcaccagtggcaagtgcaggcagctgtcccggttatgccggaatcattgcaggtgagtccatcagaaacaggagctgacaacccgctgggcacccgaagaccaagccccctgccagctcaccgtgcccagcctcctgcatcccctcgaagagcctggccagagagggaagacacagatgatgaagctggagccagggctgccggtccgagtctcctacctcccccaaccctgcccgcccctgaaggctacctggcgccttgggggctgtccctcaagttatctcctctgttaagacaaaaagtaaagcactgtggtctttgaaaaaaaaaaaaaaaaaaaaaa

SEQ ID NO: 6580 - protein, 178 aa, Homo sapien [sequence omitted]

SEQ ID NO: 6581 - DNA, 1301 bp, Homo sapien; identical to SEQ ID NO: 3493

SEQ ID NO: 6582 - protein, 153 aa, Homo sapien; identical to SEQ ID NO: 3494

SEQ ID NO: 6583 - DNA, 2320 bp, Homo sapien; identical to SEQ ID NO: 1768

SEQ ID NO: 6584 - protein, 495 aa, Homo sapien; identical to SEQ ID NO: 1769

SEQ ID NO: 6585 - DNA, 6885 bp, Homo sapien
  Unsure 3219: Unknown base
  Unsure 3704: Unknown base
tcaagaccaccctggctaacacggtgaaaccctgtctctactaaaaatacaaaaaattagccgggcggggtggtgggcgcctgtagtcccagctactcgggaggctgagggaggagaatggcgtgaacctgggaggcggagtttgcagtgagcagagatcgcgccattgcactccagcctgggtgacagacagagactctgtctcaaaaaagaaaaaaaaagaaaaaaagaaaaagaaagtgtggtctctgttgcctacatcaccatcaccttgagtcctacatcctttgaatgagtcttgggggtgtgccctagaaaatcattggccaattcccgaagccagtacatgtagaagccaaatctgagttatgcaaatacattatttttctattgttcaacttacctctatttgggtctccattctacctgcctgcaagaaaacattctctcagtcacttccaggtgaactccgtcatcccactccttctcccacctccaccattgatctaaatttggggagttcctctgagccacagcctaggtggggtggggtgggaaggggctgctggatgagagtcctctttctgagatgaatcctcctgggcccttcatctccgtgggtcacacatgccctcatttctactctgctgctgccgtccccacgatccaatagcaatagcacgacccctggccttgaccgtgtatctggggctctgtcccttccacatcacccccaaaccagcatcaaatgtcttgtctggctctgcactaggctcccctcagttagtgcaggggtgtccaactgggggcggaagggcttcctgtgcctgcctcttccaatcctccatgtcttatttataccctgacagacatgaagggttttgaacttaaaaggctgggaatttggcatcttttgttctctgactaagaaagaggaaatcatttcaagaccaaaaagcagggagccagcatctcacagcatggatctgagaccccccgtggaagctgctcttttctttctcatcacataagcgtgagcccgggactgtcagtgcacaaggaccagggacgcggctgctcctctgagggggaggaagccaagagtatcttctcttagattgggctgagttcccacacccagcacacacattccctgctcactcacctcccacagacagctgggaaatgacacctctggtgacagagccactctccgggcttctgtggggagcgggtggggcactgcagtgggggaggatctcacacccggaggccctgggaagccagggtgggggagggaggaagctggttcctgtttgtcttagagatcaaggccatcagcctccctgcaccttccagggatgtagtaagcacccccaccccagggccaaagggcctcgcctaaaatgcctcctgcacccttgaggcttgctttgaccccctgcactccaccaagagcgacagctcccctgggtcccatcttctctgacaagctgggtgggagtgtatacagctgctgggtgtgcttagagggcctaatggagaccagccagggataatctcctatgttatccacatcaagccatttaacaaatatggatttagtacctacatatgcaatgtatttggggtccagagagaggagggcaacggtccaaggtcacacctgcgaggcgaatacgcatgtaaagcagcaccttgtaacctgtgcccactgtgcctactactaaagaaaaataaatgagagaaaaagaaaaaaggctttttttttttttggcccaggccctgtgcctgggaccaaagcctgagccctttcctgcagtcgggtcgctgacctaagcctggggcaaagctaggtcttggccagtcagcagccaccacgtgaagcagcccctgcccccatcacccccggcagccttgtgccctcctcctcggggtcctcagctcaccccacctcagtcgggcctgctccagcggttaagtacccctagtctgaaccttaatcgtgaggcggggcagccccctccccacaccctgtagacactcccccgtcctccgccccctggacttgtttgggcgggaagagcctgcctcatcttttcttcctaccctcctacccagtggccagggaccccaggcttcctctgagacatccaccagcggtgatgggttgggaccaatctcccccactcctctccaccctagcagtaaggtccccgctctcgatactgccccagcacctgcactggccctctctgatttcccaactccagcccattccaagtgctgaaggcgggtcgctaggtgctgggacctgggcgcggggcaagaccttgggctgtgtggggtgcaggctgggtttactgggttcacgattgagggagtggtctgggggttaggtgtagggccaggctgcgttgtgctctaaggggcaggcggcaggcggtttgggggggctgtggtcagacagggtggggtggcggtgggtttggggaagccgcagcagcccgccttggggtcccgcgagtgccgagggagctgccggggcatggtggcgcggggcccgtggtcctgcccggcacgacccccgccccgcagcgccccgcagcgccccgcccccgcggccccgctcgcgacgcgtctcccgcggcgccccgcccccgcccgcagtgcccggatgcgggtgacgcgcggccgccatctttccgtcccgggcagccagcgccagtcggagccagcgcgagcgccgccgccatcactgccgctgccaagtcctccacccgctgcccccgccatgtgagtcggccgcccgccaccctcaccgcgcttccctgcgccggccgccgcccttggcaaccggccgtcgggagtgcccggggtctcttctgcgttccccgcgccccggggccaggcccaagccggtgactgcgcgcgggcggccgaggagccccgcgtcccgggctggccggctcgggcgatggccgcgggaaggagcggacccagtgtcctcctgcccctccccgcccctgtcaccgcggccgcctgtcttttcgggtcgacccggatcgcatctgtgaggtcgccctcagttgacaggcggggaaactgaggccgggggggcctcgctcaaggtcacgcagctcatcggcggcagggctggaccgagaccagggcttacatcgggtggccttcctcccgaaaaggaggactggagggacnaggatggacaggtggatgggcggagccctggctgcggggccgggaggctgcaagccctgggtcttaatccgtccctgctcctcaggtctgctaccgctgccacggccccccctgctgccccggctggggagggtggtccccctgcaccccctccaaacctcaccagtaacaggagactgcagcagacccaggcccaggtggatgaggtgagtgtggggggagtcaaaaccagtaggagggcccctgggggttggggataggtgtaggggcccattttggtttgggagtgatgacagttcacgcctttgggtttgcggacaaagataccatgccccatccctgtctccctgtcagcacgcacttggaagggcgctgggggtgttaatcagctttgctagcctggggtgtgccagcctgggcaggtgtgctctggtgatggacagagcgcctgaggttccatagagggagggtgttgctatgacatntgagatgtcaccagcatgcccctgatgtgtgctccttgcatgtccccaggtgtgctaggcatgttctgtgtgtccttggcatgttaacctggcagtatcagggtgcatgttccatgtgtggcacggtgggcacatgtttgaggattgccctcactgaggtgggccttggcacacccccctgcctcgtgggcccttctcccaggtggtggacatcatgagggtgaacgtggacaaggtcctggagcgagaccagaagctgtcggagctggacgaccgtgcagatgcactccaggcgggggcctcccagtttgaaacaagcgcagccaagctcaagcgcaaatactggtggaaaaacctcaaggtaagggtggggacaggaaggaggacaggtgggtgaatggggtatcatagtttgtcttactgatcctcgcctctcacccccagatgatgatcatcttgggagtgatttgcgccatcatcctcatcatcatcataggtgagtagggtgagaatggccggggccctttccctggagaggtttccccagtggattctaggttttgaaggtcattaatctagtttttactcttcagccaaaaacacatatagctgctaatggcaattctgattcatctagagccaaaaactttgatgttatttagcctgcattttgcctagttcttggcagtcttgttaacatttggaaataggaaagctggtgtatccattgaggaccctttaggcctaagagcccagtctgagaaccctggaattgaggagtgggagaaaggaaaggaccaggggcttgagacatgaccaggaagccaaccaccccattatttgagagcttgcggtctcagaggctcagaggattagggtctgtggcttcaaggccataccatggagcggaagggacctcagaacctacctgtctagccccttgctttgtagatggaaaaactgagtccaagagagggtgtcagccagctggggagtggggaggattggagcagggccaggcctgacacactgctttcttgttctctctctttctctcccctctccctcttcctcatcttcttcccctctctccacagtttacttcagctcttaaatccccgaggagtctgccctgcctagagaagggcctctcccccaaccctcagccgttcctccacctctcagccatatctttcagccccccctcccctggatccgtgtgtgtgtgtgtccgtgtgtgtgtccccctgtaaatagccagctgttatttatacatatataatattatatatatttggtctgtttgtagttttattactagatgatttttccggttgtccttaacaccccttcctgaggttcccttcacccctctctcttgccttccttccctttccctttcttcctgactagccccaagtcccttcatttgcatctgctatgcaatagtccctctcctttccttcttcttccctcagatttagctgatccttcctcccaccctggccttcctttcctctttcctcctcactctccccgtcatgctccctctgccccgccctcaaaaaaaaaaaaaaaaaaaaaaaaaaaaaaaaccaccagcacctgtccaggcttccttaggtacatcttctttgtatccattgggaggctctgagactggccccacttggtcctaaaaatcccaaggtctttgggagcgtccagcatgttaattagcgtatcattacatactgctatccctttccatttctttttgttccatcactcttctctcaacctgtgtttctttttttactgaggagttagtccccattagttcttgtatcacattttcatttgcacgacattactcgcaggtggtggggagcctgggcttttggggaaccaggctgctctggtccccagcattgcctcctcctagcccctctagtccagtttgcctcccttaccctcattttccaaacctcttgtaccctcctctccctcccccagtggtatgtaagtgtcttgaagttcagtatgttatgatggaccaataattctgcccttcgggtttctccctacattcctgctccccagttttcatgtggggtactcaactgacattcccatggggtttccctcccatctgcctgatccacctcctcctcccaccacaagatcaattgttggccacaattgatctcttgtagaggggtggctaccagtgtgtgtgtgggggtcatcactgccttggggaggagtggggcagggcagagaatccccccaattcctgcctgaaatctctggcctcacccctgctgggggttggactgaaaaccctcctccccaatttggggggtgttgccccatcactgcccagctcctctgactgccccccctgaatttagggtgggggtactagtcactgccaatgtgtgtatgggacttgctggaaaacggggatgcttgcccctctccaggactattgagcccagagagagctgtcctctcattgggtgaactgattgaggaagggtctattgtctttttaaatggcacaattttaagggtttgagggtacagtcccttaacctgccacgggagggggcccccaaactttcttcccccccacacttctggttttctgtgtggagggggagcagggatatctaagctgtggtgtgaaagggtaggagagatgctggaggtgggggtgctgtgttctagaccccccatattatcccagtgtcccctgcccccctcttcccccaccccatgcccccaattctgtggcgcatccagattgtgaaaatgtacaataaatgtgtaatgagtaaccaggtgttgtctaagatcttttttatttttctattttttttttttggttgggggagaataagatcttttcttaaccaatgggaataatattggatcggaaggtataccaggaaggttgagaagatacattggtaatggactggactttgcaagaggccctgaccttgggcagggcaaagtgtgattctcaaagtggccacaggggggcactaggagttggtaatgggaagtgtcatagccagcccgtgtctctaagcccggtgcgccctatggtctagggttcccagctttcgtttccctttactggggcatgttcctgctgttggactcctttctactcctcgatttaacttctaga

SEQ ID NO: 6586 - DNA, 2358 bp, Homo sapien
ggcacgaggcccagttgttgatcttatgcaagacgctgcacgaccccgcgcccgcttgtcgccacggcacttgaggcagccggagatactctgagttactcggagcccgacgcctgagggtgagatgaacgcgctggcctccctaaccgtccggacctgtgatcgcttctggcagaccgaaccggcgctcctgcccccggggtgacgcgcagctcccagccgcccagacacatggccccaggccaagcaccccatcaggctaccccgtggagggatgcccaccctttcttcctcctgtccccagtgatgggcctcctcagccgcgcctggagccgcctgaggggcctgggacctctagagccctggctggtggaagcagtaaaaggagcagctctggtagaagctggcctggagggagaagctaggactcctctggcaatcccccataccccttggggcagacgccctgaagaggaggctgaagacagtggaggccctggagaggacagagaaacactggggctgaaaaccagcagttcccttcctgaagcctggggacttttggatgatgatgatggcatgtatggtgagcgagaggcaaccagtgtccctagagggcagggaagtcaatttgcagatggccagcgtgctcccctgtctcccagccttctgataaggacactgcaaggttctgataagaacccaggggaggagaaagccgaggaagagggagttgctgaagaggagggagttaacaagttctcttatccaccatcacaccgggagtgttgtccagccgtggaggaggaggacgatgaagaagctgtaaagaaagaagctcacagaacctctacttctgccttgtctccaggatccaagcccagcacttgggtgtcttgcccaggggaggaagagaatcaagccacggaggataaaagaacagaaagaagtaaaggagccaggaagacctccgtgtccccccgatcttcaggctccgaccccaggtcctgggagtatcgttcaggagaggcgtccgaggagaaggaggaaaaggcacacaaagaaactgggaaaggagaagctgccccagggccgcaatcctcagccccagcccagaggccccagctcaagtcctggtggtgccaacccagtgatgaagaggagggtgaggtcaaggctttgggggcagctgagaaggatggagaagctgagtgtcctccctgcatccccccaccaagtgccttcctgaaggcctgggtgtattggccaggagaggacacagaggaagaggaagatgaggaagaagatgaggacagtgactctggatcagatgaggaagagggagaagctgaggcttcctcttccactcctgctacaggtgtcttcttgaagtcctgggtctatcagccaggagaggacacagaggaggaggaagatgaggacagtgatacaggatcagccgaggatgaaagagaagctgagacttctgcttccacaccccctgcaagtgctttcttgaaggcctgggtgtatcggccaggagaggacacggaggaggaggaagatgaggatgtggatagtgaggataaggaagatgattcagaagcagccttgggagaagctgagtcagacccacatccctcccacccggaccagagggcccacttcaggggctggggatatcgacctggaaaagagacagaggaagaggaagctgctgaggactggggagaagctgagccctgccccttccgagtggccatctatgtacctggagagaagccaccgcctccctgggctcctcctaggctgcccctccgactgcaaaggcggctcaagcgcccagaaacccctactcatgatccggaccctgagactcccctaaaggccagaaaggtgcgcttctccgagaaggtcactgtccatttcctggctgtctgggcagggccggcccaggccgcccgccagggcccctgggagcagcttgctcgggatcgcagccgcttcgcacgccgcatcacccaggcccaggaggagctgagcccctgcctcacccctgctgcccgggccagagcctgggcacgcctcaggaacccacctttagcccccatccctgccctcacccagaccttgccttcctcctctgtcccttcgtccccagtccagaccacgcccttgagccaagctgtggccacaccttcccgctcgtctgctgctgcagcggctgccctggacctcagtgggaggcgtggctgagaccaactggtttgcctataatttattaactatttattttttctaagtgtgggtttatataaggaataaagccttttgatttgtaaaaaaaaaaaaaaaaaa

SEQ ID NO: 6587 - protein, 674 aa, Homo sapien
MAPGQAPHQATPWRDAHPFFLLSPVMGLLSRAWSRLRGLGPLEPWLVEAVKGAALVEAGLEGEARTPLAIPHTPWGRRPEEEAEDSGGPGEDRETLGLKTSSSLPEAWGLLDDDDGMYGEREATSVPRGQGSQFADGQRAPLSPSLLIRTLQGSDKNPGEEKAEEEGVAEEEGVNKFSYPPSHRECCPAVEEEDDEEAVKKEAHRTSTSALSPGSKPSTWVSCPGEEENQATEDKRTERSKGARKTSVSPRSSGSDPRSWEYRSGEASEEKEEKAHKETGKGEAAPGPQSSAPAQRPQLKSWWCQPSDEEEGEVKALGAAEKDGEAECPPCIPPPSAFLKAWVYWPGEDTEEEEDEEEDEDSDSGSDEEEGEAEASSSTPATGVFLKSWVYQPGEDTEEEEDEDSDTGSAEDEREAETSASTPPASAFLKAWVYRPGEDTEEEEDEDVDSEDKEDDSEAALGEAESDPHPSHPDQRAHFRGWGYRPGKETEEEEAAEDWGEAEPCPFRVAIYVPGEKPPPPWAPPRLPLRLQRRLKRPETPTHDPDPETPLKARKVRFSEKVTVHFLAVWAGPAQAARQGPWEQLARDRSRFARRITQAQEELSPCLTPAARARAWARLRNPPLAPIPALTQTLPSSSVPSSPVQTTPLSQAVATPSRSSAAAAAALDLSGRRG

SEQ ID NO: 6588 - DNA, 3429 bp, Homo sapien
ggctggaagccggaagcgagcaaagtggagccgactcgaactccaccggcacgagggcggaaaagaaagcctcagaacgttcgctcgctgcgtccccagccggggccgagccctccgcgacgccacccgggccatgggggccgcacgcagcccgccgtccgctgtcccggggcccctgctggggctgctcctgctgctcctgggcgtgctggccccgggtggcgcctccctgcgactcctggaccaccgggcgctggtctgctcccagccggggctaaactgcacggtcaagaatagtacctgcctggatgacagctggattcaccctcgaaacctgaccccctcctccccaaaggacctgcagatccagctgcactttgcccacacccaacaaggagacctgttccccgtggctcacatcgaatggacactgcagacagacgccagcatcctgtacctcgagggtgcagagttatctgtcctgcagctgaacaccaatgaacgtttgtgcgtcaggtttgagtttctgtccaaactgaggcatcaccacaggcggtggcgttttaccttcagccactttgtggttgaccctgaccaggaatatgaggtgaccgttcaccacctgcccaagcccatccctgatggggacccaaaccaccagtccaagaatttccttgtgcctgactgtgagcacgccaggatgaaggtaaccacgccatgcatgagctcaggcagcctgtgggaccccaacatcaccgtggagaccctggaggcccaccagctgcgtgtgagcttcaccctgtggaacgaatctacccattaccagatcctgctgaccagttttccgcacatggagaaccacagttgctttgagcacatgcaccacatacctgcgcccagaccagaagagttccaccagcgatccaacgtcacactcactctacgcaaccttaaagggtgctgtcgccaccaagtgcagatccagcccttcttcagcagctgcctcaatgactgcctcagacactccgcgactgtttcctgcccagaaatgccagacactccagaaccaattccggactacatgcccctgtgggtgtactggttcatcacgggcatctccatcctgctggtgggctccgtcatcctgctcatcgtctgcatgacctggaggctagctgggcctggaagtgaaaaatacagtgatgacaccaaatacaccgatggcctgcctgcggctgacctgatccccccaccgctgaagcccaggaaggtctggatcatctactcagccgaccaccccctctacgtggacgtggtcctgaaattcgcccagttcctgctcaccgcctgcggcacggaagtggccctggacctgctggaagagcaggccatctcggaggcaggagtcatgacctgggtgggccgtcagaagcaggagatggtggagagcaactctaagatcatcgtcctgtgctcccgcggcacgcgcgccaagtggcaggcgctcctgggccggggggcgcctgtgcggctgcgctgcgaccacggaaagcccgtgggggacctgttcactgcagccatgaacatgatcctcccggacttcaagaggccagcctgcttcggcacctacgtagtctgctacttcagcgaggtcagctgtgacggcgacgtccccgacctgttcggcgcggcgccgcggtacccgctcatggacaggttcgaggaggtgtacttccgcatccaggacctggagatgttccagccgggccgcatgcaccgcgtaggggagctgtcgggggacaactacctgcggagcccgggcggcaggcagctccgcgccgccctggacaggttccgggactggcaggtccgctgtcccgactggttcgaatgtgagaacctctactcagcagatgaccaggatgccccgtccctggacgaagaggtgtttgaggagccactgctgcctccgggaaccggcatcgtgaagcgggcgcccctggtgcgcgagcctggctcccaggcctgcctggccatagacccgctggtcggggaggaaggaggagcagcagtggcaaagctggaacctcacctgcagccccggggtcagccagcgccgcagcccctccacaccctggtgctcgccgcagaggagggggccctggtggccgcggtggagcctgggcccctggctgacggtgccgcagtccggctggcactggcgggggagggcgaggcctgcccgctgctgggcagcccgggcgctgggcgaaatagcgtcctcttcctccccgtggaccccgaggactcgccccttggcagcagcacccccatggcgtctcctgacctccttccagaggacgtgagggagcacctcgaaggcttgatgctctcgctcttcgagcagagtctgagctgccaggcccaggggggctgcagtagacccgccatggtcctcacagacccacacacgccctacgaggaggagcagcggcagtcagtgcagtctgaccagggctacatctccaggagctccccgcagccccccgagggactcacggaaatggaggaagaggaggaagaggagcaggacccagggaagccggccctgccactctctcccgaggacctggagagcctgaggagcctccagcggcagctgcttttccgccagctgcagaagaactcgggctgggacacgatggggtcagagtcagaggggcccagtgcatgagggcggctccccagggaccgcccagatcccagctttgagagaggagtgtgtgtgcacgtattcatctgtgtgtacatgtctgcatgtgtatatgttcgtgtgtgaaatgtaggctttaaaatgtaaatgtctggattttaatcccaggcatccctcctaacttttctttgtgcagcggtctggttatcgtctatccccaggggaatccacacagcccgctcccaggagctaatggtagagcgtccttgaggctccattattcgttcattcagcatttattgtgcacctactatgtggcgggcatttgggataccaagataaattgcatgcggcatggccccagccatgaaggaacttaaccgctagtgccgaggacacgttaaacgaacaggatgggccgggcacggtggctcacgcctgtaatcccagcacactgggaggccgaggcaggtggatcactctgaggtcaggagtttgagccagcctggccaacatggtgaaaccccatctccactaaaaatagaaaaattagccgggcatggtgacacatgcctgtagtcctagctacttgggaggctgaggcaggagaattgcttgaatctgggaggcagaggttgcagtgagccgagattgtgccattgcactgcagcctggatgacagagcgagactctatctcaaaaaaaaaaaaaaaaaa

SEQ ID NO: 6589 - protein, 866 aa, Homo sapien
MGAARSPPSAVPGPLLGLLLLLLGVLAPGGASLRLLDHRALVCSQPGLNCTVKNSTCLDDSWIHPRNLTPSSPKDLQIQLHFAHTQQGDLFPVAHIEWTLQTDASILYLEGAELSVLQLNTNERLCVRFEFLSKLRHHHRRWRFTFSHFVVDPDQEYEVTVHHLPKPIPDGDPNHQSKNFLVPDCEHARMKVTTPCMSSGSLWDPNITVETLEAHQLRVSFTLWNESTHYQILLTSFPHMENHSCFEHMHHIPAPRPEEFHQRSNVTLTLRNLKGCCRHQVQIQPFFSSCLNDCLRHSATVSCPEMPDTPEPIPDYMPLWVYWFITGISILLVGSVILLIVCMTWRLAGPGSEKYSDDTKYTDGLPVADLIPPPLKPRKVWIIYSADHPLYVDVVLKFAQFLLTACGTEVALDLLEEQAISEAGVMTWVGRQKQEMVESNSKIIVLCSRGTRAKWQALLGRGAPVRLRCDHGKPVGDLFTAAMNMILPDFKRPACFGTYVVCYFSEVSCDGDVPDLFGAAPRYPLMDRFEEVYFRIQDLEMFQPGRMHRVGELSGDNYLRSPGGRQLRAALDRFRDWQVHCPDWFECENLYSADDQDAPSLDEEVFEEPLLPPGTGIVKRAPLVREPGSQACLAIDPLVGEEGGAAVAKLEPHLQPRGQPAPQPLHTLVLAAEEGALVAAVEPGPLADGAAVRLALAGEGEACPLLGSPGAGRNSVLFLPVDPEDSPLGSSTPMASPDLLPEDVREHLEGLMLSLFEQSLSCQAQGGCSRPAMVLTDPHTPYEEEQRQSVQSDQGYISRSSPQPPEGLTEMEEEEEEEQDPGKPALPLSPEDLESLRSLQRQLLFRQLQKNSGWDTMGSESEGPSA

SEQ ID NO: 6590 - DNA, 1104 bp, Homo sapien
ggtcgcttggtggctccgtctgttgtccgtccgcccgcgggtgccatcatggcggacgcggccagtcaggtgctcctgggctccggtctcaccatcctgtcccagccgctcatgtacgtgaaagtgctcatccaggtgggatatgagcctcttcctccaacaataggacgaaatatttttgggcggcaagtgtgtcagcttcctggtctctttagttatgctcagcacattgccagtatcgatgggaggcgcgggttgttcacaggcttaactccaagactgtgttcgggagtccttggaactgtggtccatggtaaagttttacagcattaccaggagagtgacaagggtgaggagttaggacctggaaatgtacagaaagaagtctcatcttcctttgaccacgttatcaaggagacaactcgagagatgatcgctcgttctgctgctaccctcatcacacatcccttccatgtgatcactctgagatctatggtacagttcattggcagagaatccaagtactgtggactttgtgattccataataaccatctatcgggaagagggcattctaggatttttcgcgggtcttgttcctcgccttctaggtgacatcctttctttgtggctgtgtaactcactggcctacctcgtcaatacctatgcactggacagtggggtttctaccatgaatgaaatgaagagttattctcaagctgtcacaggattttttgcgagtatgttgacctatccctttgtgcttgtctccaatcttatggctgtcaacaactgtggtcttgctggtggatgccctccttactccccaatatatacgtcttggatagactgttggtgcatgctacaaaaagaggggaatatgagccgaggaaatagcttatttttccggaaggtcccctttgggaagacttattgttgtgacctgaaaatgttaatttgaagatgtggggcagggacagtgacatttctgtagtcccagatgcacagaattatgggagagaatgttgatttctatacagtgtggcgcgcttttttaataatcatttaatcttgggaaaattaaaaaaaaaaaaaaaaaaaaaaa

SEQ ID NO: 6591 - protein, 303 aa, Homo sapien
MADAASQVLLGSGLTILSQPLMYVKVLIQVGYEPLPPTIGRNIFGRQVCQLPGLFSYAQHIASIDGRRGLFTGLTPRLCSGVLGTVVHGKVLQHYQESDKGEELGPGNVQKEVSSSFDHVIKETTREMIARSAATLITHPFHVITLRSMVQFIGRESKYCGLCDSIITIYREEGILGFFAGLVPRLLGDILSLWLCNSLAYLVNTYALDSGVSTMNEMKSYSQAVTGFFASMLTYPFVLVSNLMAVNNCGLAGGCPPYSPIYTSWIDCWCMLQKEGNMSRGNSLFFRKVPFGKTYCCDLKMLI

SEQ ID NO: 6592 - DNA, 800 bp, Homo sapien
ggcaccaggtccccggcgaagttctgcgctggtcggcggagtagcaagtggccatggggagcctcagcggtctgcgcctggcagcaggaagctgttttaggttatgtgaaagagatgtttcctcatctctaaggcttaccagaagctctgatttgaagagaataaatggattttgcacaaaaccacaggaaagtcccggagctccatcccgcacttacaacagagtgcctttacacaaacctacggattggcagaaaaagatcctcatatggtcaggtcgcttcaaaaaggaagatgaaatcccagagactgtctcgttggagatgcttgatgctgcaaagaacaagatgcgagtgaagatcagctatctaatgattgccctgacggtggtaggatgcatcttcatggttattgagggcaagaaggctgcccaaagacacgagactttaacaagcttgaacttagaaaagaaagctcgtctgaaagaggaacagctatgaaggccaaaacagagtagcagaggtatccgtgttggctggattttgaaaatccaggaattatgttataacgtgcctgtattaaaaaggatgtggtatgaggatccatttcataaagtatgatttgcccaaacctgtaccatttccgtatttctgctgtagaagtagaaataaattttcttaaataatgactgtgttttattgttttgatccaagtcaagtgtagcctctcagccttttggagaaaaatgaaacaatttatttcaacttgaataccaactcttcagagaagcaggtaccata

SEQ ID NO: 6593 - protein, 148 aa, Homo sapien
MGSLSGLRLAAGSCFRLCERDVSSSLRLTRSSDLKRINGFCTKPQESPGAPSRTYNRVPLHKPTDWQKKILIWSGRFKKEDEIPETVSLEMLDAAKNKMRVKISYLMIALTVVGCIFMVIEGKKAAQRHETLTSLNLEKKARLKEEQL

SEQ ID NO: 6594 - DNA, 2454 bp, Homo sapien
ggcacgaggaggagagtcaggccaatggggccgcagttctttcttttttttttctttattcttatttttggagacagggtctcgctctgttgcccaggctggagtgcggtggtgcgatcacggttccatgcagcccccgacctcccgggctcaggtgattctcccgcctcagcaccgcgagcagctaggaccacaggcgcgagccactgcgtccggccggcgggacttatttgtcaggcggggattgggttccgccagcctaaagggaggggtaagcgccagaatatgaatcgccgggaagctgggagaaagctccgggaaaccctgagcagccaggtcgcctgctccgcccgctcccgctcccgatctctgattgctcctaactgacgtcactcccggtctgtccccgcccactcggtgctgccattggcagtcggtcgtgggtctgagagtcactggagctaccagaagcatcatggggccctggggagagccagagctcctggtgtggcgccccgaggcggtagcttcagagcctccagtgcctgtggggctggaggtgaagttgggggccctggtgctgctgctggtgctcaccctcctctgcagcctggtgcccatctgtgtgctgcgccggccaggagctaaccatgaaggctcagcttcccgccagaaagccctgagcctagtaagctgtttcgcggggggcgtctttttggccacttgtctcctggacctgctgcctgactacctggctgccatagatgaggccctggcagccttgcacgtgacgctccagttcccactgcaagagttcatcctggccatgggcttcttcctggtcctggtgatggagcagatcacactggcttacaaggagcagtcagggccgtcacctctggaggaaacaagggctctgctgggaacagtgaatggtgggccgcagcattggcatgatgggccaggggtcccacaggcgagtggagccccagcaaccccctcagccttgcgtgcctgtgtactggtgttctccctggccctccactccgtgttcgaggggctggcggtagggctgcagcgagaccgggctcgggccatggagctgtgcctggctttgctgctccacaagggcatcctggctgtcagcctgtccctgcggctgttgcagagccaccttagggcacaggtggtggctggctgtgggatcctcttctcatgcatgacacctctaggcatcgggctgggtgcagctctggcagagtcggcaggacctctgcaccagctggcccagtctgtgctagagggcatggcagctggcacctttctctatatcacctttctggaaatcctgccccaggagctggccagttctgagcaaaggatcctcaaggtcattctgctcctagcaggctttgccctgctcactggcctgctcttcatccaaatctagggggcttcaagagaggggcaggggagattgatgatcaggtgcccctgttctcccttccctcccccagttgtggggaataggaaggaaaggggaagggaaatactgaggaccaaaaagttctctgggagctaaagatagagcctttggggctatctgactaatgagagggaagtgggcagacaagaggctggccccagtcccaaggaacaagagatggtcaagtcgctagagacatatcaggggacattaggattggggaagacacttgactgctagaatcagaggttggacactatacataaggacaggctcacatgggaggctggaggtgggtacccagctgctgtggaacgggtatggacaggtcataaacctagagtcagtgtcctgttggtcctagcccatttcagcaccctgccacttggagtggacccctcctactcttcttagcgcctaccctcatacctatctccctcctcccatctcctaggggactggcgccaaatggtctctccctgccaattttggtatcttctctggcctctccagtcctgcttactcctctatttttaaagtgccaaacaaatccccttcctctttctcaaagcacagtaatgtggcactgagccctacccagcacctcagtgaagggggcctgcttgctctttattttggtcccggatcctggggtggggcagaaatattttctgggctggggtaggaggaaggttgttgcagccatctactgctgctgtaccctaggaatatggggacatggacatggtgtcccatgcccagatgataaacactgagctgccaaaacatttttttaaatacacccgaggagcccaagggggaagggcaatgcctacccccagcgttatttttggggagggagggctgtgcatagggacatattctttagaatctattttattaactgacctgttttgggacctgttacccaaataaaagatgtttctagaaaaaaaaaaaaaaaaaaa

SEQ ID NO: 6595 - protein, 324 aa, Homo sapien
MGPWGEPELLVWRPEAVASEPPVPVGLEVKLGALVLLLVLTLLCSLVPICVLRRPGANHEGSASRQKALSLVSCFAGGVFLATCLLDLLPDYLAAIDEALAALHVTLQFPLQEFILAMGFFLVLVMEQITLAYKEQSGPSPLEETRALLGTVNGGPQHWHDGPGVPQASGAPATPSALRACVLVFSLALHSVFEGLAVGLQRDRARAMELCLALLLHKGILAVSLSLRLLQSHLRAQVVAGCGILFSCMTPLGIGLGAALAESAGPLHQLAQSVLEGMAAGTFLYITFLEILPQELASSEQRILKVILLLAGFALLTGLLFIQI

SEQ ID NO: 6596 - DNA, 1232 bp, Homo sapien; identical to SEQ ID NO: 1626

SEQ ID NO: 6597 - protein, 196 aa, Homo sapien; identical to SEQ ID NO: 1627

SEQ ID NO: 6598 - DNA, 3333 bp, Homo sapien; identical to SEQ ID NO: 4156

SEQ ID NO: 6599 - protein, 571 aa, Homo sapien; identical to SEQ ID NO: 4157

SEQ ID NO: 6600 - DNA, 4246 bp, Homo sapien
gatgagattgatgattctttctcctggaaaacctttcatcacagagattcatctcagcattaaagggcagtatttaaagtcagttggcaagcagtggaataagatttttgtaaagaaaccttgtgcagcatggattctctaccagatgaattttttgtgaggcatcctgctgtggaggatcagaggaaggaagaaactgagaataagctagaaaaatcatctggtcaactgaacaaacaggaaaatgacatacctactgatcttgtccctgttaacctactattagaagtgaagaagttattaaatgcaattaatactctaccaaaaggtgtggttcctcacattaagaagttcttacaagaagatttttccttccaaactatgcagagagaagttgcagctaacagccagaatggtgaggaaattgttcctgctttgactttacgtttcttgattacacagctagaagcagcacttaggaacattcaagctggcaattataccgcacaccagattaatattggttattatttgacattactgtttttatatggagtagcactcactgaaagaggaaagaaagaggattatacagaagctgagaataaatttctggtgatgaagatgatgatccaagaaaatgaaatttgtgaaaactttatgtctttagtttattttggacgtggtttactgcgatgtgctcaaaagagatataatggaggactgctagaatttcataaaagcttacaagaaattggagacaaaaatgaccattggtttgacatagatcctacagaagatgaagatttacctacaacttttaaagatcttcttaataattttatcaagacaactgaaagcaatataatgaagcagacgatttgtagttacctagattgtgaacgatcttgtgaagctgacattttgaagaacaccagttataagggattttttcagttaatgtgcagtaaaagttgctgtgtttatttccataaaatttgctggaaaaagttcaagaatttaaagtatccaggtgaaaatgatcagagttttagtgggaaaaaatgtttgaaggaaggatgtacaggtgacatggtaaggatgctgcaatgtgatgtacctggaattgttaaaattttgtttgaagttgtgagaaaggatgaatatatcaccattgaaaatttaggagcaagttatagaaagttgatatctctgaaaataactgatactgatataagaccgaagatcagtttaaaatttaatacaaaagatgaaatgcctatcttcaagcttgattataattatttctatcatctgcttcatataattattatttctggtactgacattgttcgacaaatatttgatgaggctatgccacctcctcttttgaaaaaagagcttcttatacacaagaatgtgctggaatcctactacaaccatctttggaccaatcatcctttgggtggatcatggcatctgctttatcctcctaacaaggagttaccgcaatccaaacagtttgacttatgcctcctgttagctcttataaaacatttaaatgtgttccctgcacccaaaaaaggatggaatatggaaccgccatcttctgacatctctaaatctgcagacatcctgagactgtgcaaatacagggatatcctccttagtgagattttgatgaatggtctcactgagtcacagttcaattcaatttggaaaaaagtttcagatattcttctgcgccttgggatgatgcaagaggatattgacaaagtgaaggagaatcccattgagaatatctcccttgattaccatcagctatctgtctacctaggcataccagtaccagaaatcatacagaggatgttatcctgctatcaacaaggaattgctctacagtcaataacaggcagtcagcgtattgaaatagaagagttacagaatgaggaagaagaactaagtccacctctcatggagtacaatataaatgtgaaatcacaccctgagatacagtttgcagaaattaataaagatgggacctcaatacccagtgaatcttcaacagaatctcttaaagatctccaggaagttaagagtaaacaaaggaaaaagaagaagactaagaataaaaagaataaagactcaaaagaagaccaagtcccatatgtggtagaaaaggaagagcagttgaggaaagaacaagcaaatccacactcagtcagtagacttataaaagatgatgcaagtgatgttcaagaggattctgcaatggaagacaagttctatagcctggatgaattgcatattctggacatgatagagcagggctcagctggcaaagtaactacagactatggagaaactgaaaaggaaaggcttgctcgtcaaaggcagctttataaattgcactatcagtgtgaagatttcaaaagacagttgagaacagtgacttttcggtggcaagaaaaccaaatgcagattaaaaagaaagacaaaattatcgcatctcttaatcaacaagttgcttttggaatcaataaggtttccaaattacagcgtcaaatccatgctaaagataatgaaatcaagaaccttaaagagcaactttctatgaaaagatctcagtgggaaatggaaaaacataatctggaaagcacaatgaaaacatacgtaagcaaactgaacgcagaaactagcagagctttaacagccgaggtgtatttcttacagtgtcgtagggattttggtttgcttcatctagagcagactgaaaaggaatgtctcaatcagcttgccagggtgactcacatggcagcaagcaacctagaatcacttcaattaaaggctgcggtagacagttggaatgccattgtggcagatgttagaaacaagattgcattcctcaggacacagtacaatgaacaaataaacaaagtcaagcaaggatttgccttgagtaccttgcctccagtccagcttcctcctccaccacccagtcctgagatactgatgcagcagttcttaggaagaccccttgtgaaagaatctttctttagacccatacttactgttcctcaaatgcctgcagtttgcccgggagtcgtctctgcaactggccaacctagagcccccctgatgactggcatagcctgggctctgccagcgcctgtgggagacgctgtgcctcccagtgcaggtctgcggagtgatccctccatcatgaattgggagagaattacagacaggctgaaaactgcctttccacagcaaaccagaaaggaacttacagatttcttacggaaattgaaggatgcttatggaaaatccttgtctgaactgacatttgatgaaattgtttgcaagatttcccagtttattgaccccaaaaagtctcagagtcaaggaaaatcagtgtcaaatgttaattgtgtttcacctagtcattctccatcacagcctgatgctgcccagcccccaaaaccagcctggaggccactcacttcacagggtcctgccacatgggaaggagccagtaatccagatgaggaagaggaagaagaagagccttgtgtgatctgtcatgagaatctgtctccagaaaatctttcagttttgccttgcgctcacaaattccatgctcagtgcattagaccatggttgatgcaacaggggacatgtccaacgtgcagactccacgttttgctaccagaagaattccctggtcaccccagccggcagttgcccaagatctgatacaaggtcggggtgtctatgcaaaggaagctcagttttcttttattatgagctgcttgtttgagtggtgtaaaactatgtgctcttcaatatagtgctaaagaagccagctaattttatcaaagcagcagccaaagaagtcaggacaaatcttcaggacttgtgaaatgaactgaaagagcttgaagcagatggaattttaatagttacactatatatgctcttagtaggtttttttcttgtagtggaaacataactgttagcatatttcttaggatgttttttcttgtctttttaaattcttatttcactcatcctttactctcccctcaagtattctacactttaatttcctgaaataaatttaaggaaaagggaaatagtaaagaagtaggaatgggtgcagcacaccagcatggcacatgaatacacatgtaactaacctgcacattgtgcacatgtaccctaaaacttaaagtataataataat

SEQ ID NO: 6601 - protein, 1208 aa, Homo sapien
MDSLPDEFFVRHPAVEDQRKEETENKLEKSSGQLNKQENDIPTDLVPVNLLLEVKKLLNAINTLPKGVVPHIKKFLQEDFSFQTMQREVAANSQNGEEIVPALTLRFLITQLEAALRNIQAGNYTAHQINIGYYLTLLFLYGVALTERGKKEDYTEAENKFLVMKMMIQENEICENFMSLVYFGRGLLRCAQKRYNGGLLEFHKSLQEIGDKNDHWFDIDPTEDEDLPTTFKDLLNNFIKTTESNIMKQTICSYLDCERSCEADILKNTSYKGFFQLMCSKSCCVYFHKICWKKFKNLKYPGENDQSFSGKKCLKEGCTGDMVRMLQCDVPGIVKILFEVVRKDEYITIENLGASYRKLISLKITDTDIRPKISLKFNTKDEMPIFKLDYNYFYHLLHIIIISGTDIVRQIFDEAMPPPLLKKELLIHKNVLESYYNHLWTNHPLGGSWHLLYPPNKELPQSKQFDLCLLLALIKHLNVFPAPKKGWNMEPPSSDISKSADILRLCKYRDILLSEILMNGLTESQFNSIWKKVSDILLRLGMMQEDIDKVKENPIENISLDYHQLSVYLGIPVPEIIQRMLSCYQQGIALQSITGSQRIEIEELQNEEEELSPPLMEYNINVKSHPEIQFAEINKDGTSIPSESSTESLKDLQEVKSKQRKKKKTKNKKNKDSKEDQVPYVVEKEEQLRKEQANPHSVSRLIKDDASDVQEDSAMEDKFYSLDELHILDMIEQGSAGKVTTDYGETEKERLARQRQLYKLHYQCEDFKRQLRTVTFRWQENQMQIKKKDKIIASLNQQVAFGINKVSKLQRQIHAKDNEIKNLKEQLSMKRSQWEMEKHNLESTMKTYVSKLNAETSRALTAEVYFLQCRRDFGLLHLEQTEKECLNQLARVTHMAASNLESLQLKAAVDSWNAIVADVRNKIAFLRTQYNEQINKVKQGFALSTLPPVQLPPPPPSPEILMQQFLGRPLVKESFFRPILTVPQMPAVCPGVVSATGQPRAPLMTGIAWALPAPVGDAVPPSAGLRSDPSIMNWERITDRLKTAFPQQTRKELTDFLRKLKDAYGKSLSELTFDEIVCKISQFIDPKKSQSQGKSVSNVNCVSPSHSPSQPDAAQPPKPAWRPLTSQGPATWEGASNPDEEEEEEEPCVICHENLSPENLSVLPCAHKFHAQCIRPWLMQQGTCPTCRLHVLLPEEFPGHPSRQLPKI

SEQ ID NO: 6602 - DNA, 1884 bp, Homo sapien
gacgtgaacggtcgttgcagagattgcgggcggctgagacgccgcctgcctggcacctaggagcgcagcggagccccgacaccgccgccgccgccatggagtccgagaccgaacccgagcccgtcacgctcctggtgaagagccccaaccagcgccaccgcgacttggagctgagtggcgaccgcggctggagtgtgggccacctcaaggcccacctgagccgcgtctaccccgagcgtccgcgtccagaggaccagaggttaatttattctgggaagctgttgttggatcaccaatgtctcagggacttgcttccaaagcaggaaaaacggcatgttttgcatctggtgtgcaatgtgaagagtccttcaaaaatgccagaaatcaacgccaaggtggctgaatccacagaggagcctgctggttctaatcggggacagtatcctgaggattcctcaagtgatggtttaaggcaaagggaagttcttcggaacctttcttcccctggatgggaaaacatctcaaggcctgaagctgcccagcaggcattccaaggcctgggtcctggtttctccggttacacaccctatgggtggcttcagctttcctggttccagcagatatatgcacgacagtactacatgcaatatttagcagccactgctgcatcaggggcttttgttccaccaccaagtgcacaagagatacctgtggtctctgcacctgctccagcccctattcacaaccagtttccagctgaaaaccagcctgccaatcagaatgctgctcctcaagtggttgttaatcctggagccaatcaaaatttgcggatgaatgcacaaggtggccctattgtggaagaagatgatgaaataaatcgagattggttggattggacctattcagcagctacattttctgtttttctcagtatcctctacttctactcctccctgagcagattcctcatggtcatgggggccaccgttgttatgtacctgcatcacgttgggtggtttccatttagaccgaggccggttcagaacttcccaaatgatggtcctcctcctgacgttgtaaatcaggaccccaacaataacttacaggaaggcactgatcctgaaactgaagaccccaaccacctccctccagacagggatgtactagatggcgagcagaccagcccctcctttatgagcacagcatggcttgtcttcaagactttctttgcctctcttcttccagaaggccccccagccatcgcaaactgatggtgtttgtgctgtagctgttggaggctttgacaggaatggactggatcacctgactccagctagattgcctctcctggacatggcaatgatgagtttttaaaaaacagtgtggatgatgatatgcttttgtgagcaagcaaaagcagaaacgtgaagccgtgatacaaattggtgaacaaaaaatgcccaaggcttctcatgtctttattctgaagagctttaatatatactctatgtagtttaataagcactgtacgtagaaggccttaggtgttgcatgtctatgcttgaggaacttttccaaatgtgtgtgtctgcatgtgtgtttgtacatagaagtcatagatgcagaagtggttctgctggtacgatttgattcctgttggaatgtttaaattacactaagtgtactactttatataatcaatgaaattgctagacatgttttagcaggacttttctaggaaagacttatgtataattgctttttaaaatgcagtgctttactttaaactaaggggaactttgcggaggtgaaaacctttgctgggttttctgttcaataaagttttactatgaatgaccctgaaaaaaaaaaaaaaaaaaaaaa

SEQ ID NO: 6603 - protein, 391 aa, Homo sapien
MESETEPEPVTLLVKSPNQRHRDLELSGDRGWSVGHLKAHLSRVYPERPRPEDQRLIYSGKLLLDHQCLRDLLPKQEKRHVLHLVCNVKSPSKMPEINAKVAESTEEPAGSNRGQYPEDSSSDGLRQREVLRNLSSPGWENISRPEAAQQAFQGLGPGFSGYTPYGWLQLSWFQQIYARQYYMQYLAATAASGAFVPPPSAQEIPVVSAPAPAPIHNQFPAENQPANQNAAPQVVVNPGANQNLRMNAQGGPIVEEDDEINRDWLDWTYSAATFSVFLSILYFYSSLSRFLMVMGATVVMYLHHVGWFPFRPRPVQNFPNDGPPPDVVNQDPNNNLQEGTDPETEDPNHLPPDRDVLDGEQTSPSFMSTAWLVFKTFFASLLPEGPPAIAN

SEQ ID NO: 6604 - DNA, 4074 bp, Homo sapien; identical to SEQ ID NO: 866

SEQ ID NO: 6605 - protein, 807 aa, Homo sapien; identical to SEQ ID NO: 867

SEQ ID NO: 6606 - DNA, 6322 bp, Homo sapien; identical to SEQ ID NO: 125

SEQ ID NO: 6607 - protein, 292 aa, Homo sapien; identical to SEQ ID NO: 126

SEQ ID NO: 6608 - DNA, 5316 bp, Homo sapien; identical to SEQ ID NO: 789

SEQ ID NO: 6609 - protein, 424 aa, Homo sapien; identical to SEQ ID NO: 790

SEQ ID NO: 6610 - DNA, 3988 bp, Homo sapien; identical to SEQ ID NO: 741

SEQ ID NO: 6611 - protein, 1032 aa, Homo sapien; identical to SEQ ID NO: 742

SEQ ID NO: 6612 - DNA, 2416 bp, Homo sapien
gaacagtgttaccttggagcctacaatgagaggtatttcaaaatgagtgaagcatgactctcacagatgaaggcctagacgcaggatctttaatggaaaaacacttgggccacttcaagacgacaaacgctcactgggcaaaacaccttcactgaaaagagacctcatattatgcaaaaaaaatcttaagaggcctctgccttcagaagttacaagatgatcaattcaacctccacacagcctccagatgaatcctgctctcagaacctcctgatcactcagcagatcattcctgtgctgtactgtatggtcttcattgcgggaatcctactcaatggagtgtcaggatggatattcttttacgtgcccagctctaagagtttcatcatctatctcaagaacattgttattgctgactttgtgatgagcctgacttttcctttcaagatccttggtgactcaggccttggtccctggcagctgaacgtgtttgtgtgcagggtctctgccgtgctcttctacgtcaacatgtacgtcagcattgtgttctttgggctcatcagctttgacaggtattataaaattgtaaagcctctttggacttctttcatccagtcagtgagttacagcaaacttctgtcagtgatagtatggatgctcatgctcctccttgctgttccaaatattattctcaccaaccagagtgttagggaggttacacaaataaaatgtatagaactgaaaagtgaactgggacggaagtggcacaaagcatcaaactacatcttcgtggccatcttctggattgtgtttcttttgttaatcgttttctatactgctatcacaaagaaaatctttaagtcccaccttaagtcaagtcggaattccacttcggtcaaaaagaaatctagccgcaacatattcagcatcgtgtttgtgttttttgtctgttttgtaccttaccatattgccagaatcccctacacaaagagtcagaccgaagctcattacagctgccagtcaaaagaaatcttgcggtatatgaaagaattcactctgctactatctgctgcaaatgtatgcttggaccctattatttatttctttctatgccagccgtttagggaaatcttatgtaagaaattgcacattccattaaaagctcagaatgacctagacatttccagaatcaaaagaggaaatacaacacttgaaagcacagatactttgtgagttcctaccctcttccaaagaaagaccacgtgtgcatgttgtcatcttcaattacataacagaaatcaataagatatgtgccctcatcataaatatcatctctagcactgccatccaatttagttcaataaaattcaaatataagtttccatgcttttttgtaacatcaaagaaaacatacccatcagtaatttctctaatactgacctttctattctctattaataaaaaattaatacatacaattattcaattctattatattaaaataagttaaagtttataaccactagtctggtcagttaatgtagaaatttaaatagtaaataaaacacaacataatcaaagacaactcactcaggcatcttctttctctaaataccagaatctagtatgtaattgttttcaacactgtccttaaagactaacttgaaagcaggcacagtttgatgaagggctagagagctgtttgcaataaaaagtcaggtttttttcctgatttgaagaagcaggaaaagctgacacccagacaatcacttaagaaaccccttattgatgtatttcatggcactgcaaaggaagaggaatattaattgtatacttagcaagaaaattttttttttctgatagcactttgaggatattagatacatgctaaatatgttttctacaaagacttacgtcatttaatgagcctggggttctggtgttagaatatttttaagtaggctttactgagagaaactaaatattggcatacgttatcagcaacttcccctgttcaatagtatgggaaaaataagatgactgggaaaaagacacacccacaccgtagaacatatattaatctactggcgaatgggaaaggagaccattttcttagaaagcaaataaacttgatttttttaaatctaaaatttacattaatgagtgcaaaataacacataaaatgaaaattcacacatcacatttttctggaaaacagacggattttacttctggagacatggcatacggttactgacttatgagctaccaaaactaaattctttctctgctattaactggctagaagacattcatctatttttcaaatgttctttcaaaacatttttataagtaatgtttgtatctatttcatgctttactgtctatatactaataaagaaatgttttaatactg

SEQ ID NO: 6613 - protein, 338 aa, Homo sapien
MINSTSTQPPDESCSQNLLITQQIIPVLYCMVFIAGILLNGVSGWIFFYVPSSKSFIIYLKNIVIADFVMSLTFPFKILGDSGLGPWQLNVFVCRVSAVLFYVNMYVSIVFFGLISFDRYYKIVKPLWTSFIQSVSYSKLLSVIVWMLMLLLAVPNIILTNQSVREVTQIKCIELKSELGRKWHKASNYIFVAIFWIVFLLLIVFYTAITKKIFKSHLKSSRNSTSVKKKSSRNIFSIVFVFFVCFVPYHIARIPYTKSQTEAHYSCQSKEILRYMKEFTLLLSAANVCLDPIIYFFLCQPFREILCKKLHIPLKAQNDLDISRIKRGNTTLESTDTL

SEQ ID NO: 6614 - DNA, 3694 bp, Homo sapien; identical to SEQ ID NO: 1186

SEQ ID NO: 6615 - protein, 170 aa, Homo sapien; identical to SEQ ID NO: 1187

SEQ ID NO: 6616 - DNA, 4491 bp, Homo sapien; identical to SEQ ID NO: 967

SEQ ID NO: 6617 - protein, 697 aa, Homo sapien; identical to SEQ ID NO: 968

SEQ ID NO: 6618 - DNA, 2475 bp, Homo sapien; identical to SEQ ID NO: 603

SEQ ID NO: 6619 - protein, 227 aa, Homo sapien; identical to SEQ ID NO: 604

SEQ ID NO: 6620 - DNA, 4099 bp, Homo sapien
cagctgccagccgaggaggcgcggcggagaggggactgcggtcagctgcgtccacttggggctgtgcggcggtcccgcgcccggcgatgttcccgggcactccctgagtagcggcagcttatcccccgcccgctagcccgccctggtccccggctcgctcgctggctggcgcggccccggccccgctctgcgtcggccccgccgcggtggaggcgcgcgagggggacgcggccggggatgagcggattgcgggtgaactcgccgcccgggggccccgcgaagccgtgagccgctgcttttctccgagtcgccgccctgcccttggatttgagatcatgtccatccacatcgtggcgctggggaacgagggggacacattccaccaggacaaccggccgtcggggcttatccgcacttacctggggagaagccctctggtctccggggacgagagcagcttgttgctgaacgcggccagcacggtcgcgcgtccggtgttcaccgagtatcaggccagtgcgtttgggaatgtcaagctggtggtccacgactgtcccgtctgggacatatttgacagtgattggtacacttctcgaaatctaattgggggcgctgacatcattgtgatcaaatacaacgttaatgacaagttttcattccatgaagtaaaggataattatattccagtgataaaaagagcattaaattcagttccagtaattattgctgctgttggtaccagacaaaatgaagagttaccttgtacatgcccactatgtacctcagacagagggagctgtgttagtacaactgaagggatccaacttgcaaaagaactaggagcaacctatcttgaactccacagccttgatgacttctacataggaaagtattttggaggagtgttggagtattttatgattcaagccttaaatcagaagacaagtgaaaaaatgaagaaaagaaaaatgagcaactcctttcatggaattagaccacctcaacttgaacaaccagaaaaaatgcctgtcttaaaggctgaagcgtcacattataactctgacttaaataacttgctgttctgctgccagtgtgtggacgtggtattttataaccccgatttaaagaaagttgtagaggcccacaagatcgttctctgcgctgtaagccatgttttcatgctgcttttcaatgtgaagagtcccactgacattcaggattccagtatcatccgaactacccaggatctttttgctataaacagagatactgcatttccaggtgctagccatgaatcttcaggcaacccaccattacgagtcattgttaaagacgccctcttctgttcttgtttatcagacatccttcgcttcatttattcaggtgcttttcagtgggaagaattggaagaagatatcaggaagaagttgaaagattctggggatgtttcaaatgtaatcgagaaagttaaatgcattttaaaaacaccaggaaagattaattgcctaaggaattgcaaaacctatcaagccagaaaacctttgtggttttataacacttccctcaagtttttccttaataagccgatgcttgccgatgttgtcttcgaaattcaaggtacgacagtgccagcccacagggccatcctggtggcccgttgtgaagtgatggcagccatgtttaatggtaattacatggaagcaaagagtgtcctgattcccgtttatggtgtttccaaagagactttcttgtcatttttagaatacctgtacacagactcctgctgcccagctggcatattccaggccatgtgtctcctgatctgtgccgagatgtaccaagtgtccagactgcagcacatctgtgagctgttcatcattacccagctgcagagcatgccaagcagggaactggcatccatgaaccttgatatagttgacctgcttaaaaaggccaagtttcaccactctgattgcctttcaacctggctacttcatttcattgctactaactacctcatcttcagtcaaaagcctgaatttcaggatctttcagtggaagaacgcagttttgttgaaaagcacagatggccgtcgaatatgtacttgaagcagcttgcggaatacaggaagtatattcactcccggaaatgtcgttgcttagtaatgtaacctggagcttttatacactacatttcttttttattattatgaagaatgggatacctccaggttccagtaaaattcttctgaccgaaaccaatgtgggtgttagaaaaattaccatatagcttaatatgtttattagttctctttggaaaaaaactaccactgtggtcttaaaagggaacaaaatataccataggctaaaactaaggctttcactctagaatgcaaagctgttttgcagctgttttcccttaaagatgtcctgttgctttagtgatatttagacccctctcagttaagaaatgcttagattaaaaaaaaaaaattacgtaggattaatacagaaatttaatcatgtctgattaattgctctattaaaataaggggcatttaaagacccagcataaccatttgtataatgagaaatctaggggaaaaccaatcagtccaacatgagattttaggaatagaaatttgccggccatttggaaagtgaaatgccacttagttctcaattgatgacagtgtttgaatcatcataaaaaaaatacctgcttttcatctggacaacccaattgagccactttatctccttttggcaatctgagtaggcggggaacctaggcagggctggctttcttagcgtgtaacttgtgtagcagcacagggcccacacttagaaggaccccacacttggttcaaggctctgctatagcggaaattcttaataatgtttgaagaagggccccatgatttcattttgtgctgagccctcaaaattatgtctgtttcgtggtgggaaatatcctatgttttcttgctcaaacacctttctctctgaaagcagaaaaaggcactgatataaagggaagagaaggaggctcaccggagggaagagaacatagtgaagattcccgcctttggggaggtctggaccacccagggcctccactgccaccttggctggcaagggagaaatgtgttgtgttgtcttagctttaaaacagtcacagttcttgctctatcatagatgaacaaatactttcttgatcattctgtaagaccaggaggttggtaagagtgactaaccagcctaactttaatacacatgtataaagatgttcacagagaaagatgctctgtagagaatttgctaccgaagttggctcaagaatttgtttttagtgttatttaccaagattaggacgtcagtggcttaaattctttgaattcttttcaaggactgcaagattatttgataaagagtagcatgaatcttgtgctctaatattacacagtaagttcaaagaaaggatgtaagtcaaagacttgttacatagagggaaaatggactgggatagaggacagactgatagtttctttctttcatatcacatgtatagagaaataattatatcagaaactcacaaacctagacatggaaaaacagattactgtctattgtcagcatcattttcatctgtaagtcactactggaatatatttttcttttaatttccagtgactttagaatacacacagtttttccgacttttcaaaaatttgattaaatggttttatagtataatattgggaccccataccgttagcccttgtatgtataccaacactgccaaagtaaaacattaggtcaggcatggtggctcaggcctgtaatcccagcattttgggaggctgaggcaagtggataacttgaggtcatgagttcgaaaccagcctggccaaaacagtgaaaccccgtctctactaaaaatacaaaattagccagatgtggtggcgcacacctgtaatcccagctactcaggaagctgaggcaggaaaatcgcttgaacctgggaggtggaagttgcagtgagccgagatcgcaccactgcactccagcctgggtgacaagagcgaaactccatctc

SEQ ID NO: 6621 - protein, 611 aa, Homo sapien [sequence omitted]
